United States Patent Application Publication US 2026/0152767 A1 - sequence listing, part 2

SEQ ID NO: 3900 - protein, 282 aa, unidentified
MGVGEGSRVRYTYRLRVSSTARVALEAEWARCRWVWNECVAKSKQVQERGRRTGVKETCGPAGLDRMLTEARRVMPWLREGSSVPQQQMIRDFGKARAKALKDIADRLPVNRRAGMPKLKKKRDTSLSLNYTTRGFQLREGRLHLAKGIALTVVWSRELPSRPSSVRVYRDSLGHWYASFVVATSAEVLPATGAVIVIDWGVAETATTTSDAHDLPHAEFGSRAAQRLARYQRQMARRKPKHGQPSSRGYKESQAGGEGAQEGGQTAPGHRPQMGQARRDRP

SEQ ID NO: 3901 - protein, 432 aa, unidentified
MAEQIEEVPAELIQTRVYELHPNKTMRKVLDEACDYRRYCWNQGLALWNEMYKARKAIKSSLASDPKKLTEEQKVLLKEKPSPSERRVRNMLVADKKDWQYTQSARILQLAISDLGKAWNNFFDKAQPGWGKPKFRSKREARQGFKGDRSKIKDGILYLERARRSSVPKDQWCGFKLSEKPLSDEFGVVSYFKEKGRYYVAIPYKIKAEDVKLPDKTGKATAVDVNVGHFDYTGGRVNVLPKRLDRIYKKIKHYQRQLAKKRVKNGEAACESINYLKTKAKLQACYRKAGNIQNDLMHKFTTELINDYDKIVIENLSVKGMLMSHVASKGVHRSMFGKFRQILTYKCDWYGKELILANKLYPSTQRCAACGNVKKGDDKITLYGNKKHGTKHNEYVCYNEKCPNYNKVVDRDKNAMLSLLALTEHPELNHAL

SEQ ID NO: 3902 - protein, 432 aa, unidentified
MAEQVKEAPAELIQTRVYELRPNKTMRKVLDEACDYRRYCWNQGLALWNEMYKARQTLKSSLSTDSKKLTEEQKVLLKDKPSPSERRVRNMLVADKKDWQYTQSARILQLAISDLGKAWNNFFDKAQPGWGKPKFRSKREARQGFKSDQSKIKDGILYLERAKESSVPKDQWRGFKLSEKPLSDEFGVVSYFKEKGCYYVAIPYKIKAEDIKLPDKTGKATAVDVNVGHFDYTGGRMNLLPKKLDKIYGKIKHYQRQLAKKQVKNGEAACESENYLKTKAKLQACYRKASNIQNDLMQKFTTELVNNYDKIVIENLSVKGMLMSHVASKGVHRSMFGKFKQFLTYKCDWYGKELILANKLYPSTQRCAACGNVKKGDDKITLYGNKKHSTKHNEYVCYNQKCPNYNKVVDRDKNAMLSLLALTEHPELNHAL

SEQ ID NO: 3903 - protein, 414 aa, unidentified
MIQRGYRYKLGPTPEQEDLLAQFAGVCRLIYNIALEQRRDHWQRFRSRTGQNISYPSQARELTLLRDEFDWIAAVSQTCQQQTLRDLDRAYQNWFKGIAKYPTPRKKGRNDTFRYQGREVQTRKLNGKWSEVRLPKIGWVGYRDTRALRGKINNATISLDAKGWHISFAVAIEHEAPANIAPSVGVDRGVANTLALSTGERLCVPERLIKLEKRQRRAQKMLSRRKRGSRRYAKARKRVATLSALRSRIRKDWHHRASLDLSRRFGTVVLEDLKTRNMTASAKGSADEPGRMVRQKAGLNRSILNQGWHIFETLLEYKLEERGGYLCKVPAHYTSQTCAECGTVDRESRQSQASFSCKHCGHTDHADTNAAKVILRRNTASMDMEEGHWLSCEVSTRKSRKALENPPPSGGGRC

SEQ ID NO: 3904 - protein, 432 aa, unidentified
MAEQVKEAPAELIQTRVYELRPNKTMRKVLDEACDYRRYCWNQGLALWNEMYKARQTLKSSLSTDSKKLTEEQKVLLKDKPSPSERRVRNMLVADKKDWQYTQSARILQLAISDLGKAWNNFFDKAQPGWGKPKFRSKREARQGFKSDQSKIKDGILYLERAKESSVPKDQWRGFKLSEKPLSDEFGVVSYFKEKGRYYVAIPYKIKAEDIKLPDKTGKATAVDVNVGHFDYTGGRMNVLPKKLDKIYGKIKHYQRQLAKKQVKNGEAACESENYLKTKAKRQACYRKASNIQNDLMQKFTTELVNNYDKIVIENLSVKGMLMSHVASKGVHRSMFGKFKQFLTYKCDWYGKELILANKLYPSTQRCAACGNVKKGDDKITLYGNKKHGTKHNEYVCYNQKCPNYNKVVDRDKNAMLSLLALTEHPELNHAL

SEQ ID NO: 3905 - protein, 428 aa, unidentified
MKTAKAEKIKKTLKETRERRENQVCRVYQLKLQNLSKKDIEKLDRLFLEAKWLRNFVIADIENRTKDYKYKEVEIKIPDGFEKREIKTLSSQMKQELIDQIKDDLKNLKKSKENGNKVGKLKFKSEVRTIPLKQYGVTYKISGDRNRVKIQGIKKKFRVLGLHQIPENAEITKGYLIKRPSGFYLHVVCYLPKEEVLKEIEEKRIPQPVGIDLGVKHQLTLSNGEKFNWYIPETKRLKRLQKTLSKKEKGSKNYQKINHLIKREWEYISNKRKDIHNKVISYLKRFSLIAIQDDSIKSWKDGLFGKQIQNTGIGGITARLRNLATLIPVLFVDRYEATTQTCSFCGHRQEILLSERTFKCESCGREIDRDVNSARNILKTAIEQLLWMLKVVERIGEGKLLKTLPVGSGEVKPVERVIALVEAGSLPL

SEQ ID NO: 3906 - protein, 428 aa, unidentified
MKTAKAEKIKQTLKETKERRENQVCRVYQLKLQNLSKKDIEKLDRLFLEAKWLRNFVVADIENRIKDYKYKEVEIKTPEGFDKREIKLLSSQMKQEIIDQIKDDLKSLKKSKEKGNKVGKLKFKSEVRTIPLKQYGVTYKISGDRNRVKVQGIKKKFRVLGLHQIPENAEITKGYLIKKPSGYYLHIVCYLPKEEVEREIREKQIQQPVGIDLGIKHQLTLSTGEKLSWYIPETKRLKRLQKILSRKQKGSRNYQKVKKEIGKEWEYIYNKRQDALNKAISCLKRFSLIAVQDDSIEGWKKGLFGKQIQNTGIGGVTARLRSLATLISVFFVDRYEPTTQTCSFCGYRQEISLSERVFKCEGCGIEIDRDVNSAREILKVAIELLLWMLRIIENGGEGKLLKILPVDGGEVTPVERGISLVEAGSPSL

SEQ ID NO: 3907 - protein, 421 aa, unidentified
MKTAKAEKIKKTLKETRERRENQVCRVYQLKLQNLSKKGIEKLDRLFLEAKWLRNFIVADIENRTKDYKYKEVEIKIPDGFEKREIKTLSSQMKQEIIDQIKDDLRSLKKSKENGNKVGKLKFKSEVRTIPLKQYGVTYKISGDRNRVKIQGIKKKFRVLGLHQIPENAEITKGYLIKRPSGFYLHVVCYLPKEEVLKEIEEKRIPQPVGIDLGVKHQLTLSNGEKFNWYIPETKRLKRLQKTLSKKEKGSKNYQKINHLIKREWEYISNKRKDIHNKVISYLKRFSLIAIQDDSIKSWKDGLFGKQIQNTGIGGITARLRNLATLIPVLFVDRYEATTQTCSFCGHRQEILLSERTFKCESCGREIDRDVNSARNILKTAIEQLLWMVKVVERIGEGKLLKTLPVDSGEVKPVEWGTVPR

SEQ ID NO: 3908 - protein, 432 aa, unidentified
MAEQIEEVPAELIQTRVYELHPNKTMRRVLDEACDYRRYCWNQGLALWNKMYKARQALKSSLASDSKKLTEEQKVLLKEKPSPSERRVRNMLVTDKKDWQYTQSARILQLAISDLGKAWNNFFDKAQPGWGKPKFRSKREARQGFKSDRSKIKDGILYLERAKESSVPKDQWRGFKLSEEPLSDEFGVVSYFKEKGRYYVAIPYKIKAEDVKLPDKTGKATAVDVNVGHFDYTGGRVNVLPKKLDRIYKKIKHYQRQLAKKQVKNGEAACESENYLKTKAKLQACYRKASNIQNDLMHKFTTELVNDYDKIVIENLSVKGMLMSHVASKGVHRSMFGKFKQILTYKCDWYGKELILANKLYPSTQRCAACGNVKKGDDKITLYGNKKHGTKHNEYVCYNEKCPNYNKVVDRDKNAMLSLLALTEHPELNHAL

SEQ ID NO: 3909 - protein, 432 aa, unidentified
MAEQVKEAPAELIQTRVYELRPNKTMRKVLDEACDYRRYCWNQGLALWNEMYKARQTLKSSLSTDSKKLTEEQKVLLKDKPSPSERRVRNMLVADKKDWQYTQSARILQLAISDLGKAWNNFFDKAQLGWGKPKFRSKREARQGFKSDQSKIKDGILYLERAKESSVPKDQWRGFKLSEKPLSDEFGVVSYFKEKGRYYVAIPYKIKAEDIKLPDKTGKATAVDVNVGHFDYTGGRMNVLPKKLDKIYGKIKHYQRQLAKKQVKNGEAACESENYLKTKAKLQACYRKASNIQNDLMQKFTTELVNNYDKIVIENLSVKGMLMSHVASKGVHRSMFGKFKQFLTYKCDWYGKELILANKLYPSTQRCAACGNVKKGDDKITLYGNKKHGTKHNEYVCYNQKCPNYNKVVDRDKNAMLSLLALTEHPELNHAL

SEQ ID NO: 3910 - protein, 432 aa, unidentified
MAEQIEEVPAELIQTRVYELHPNKTMRKVLDEACDYRRYCWNQGLALWNEMYKARKAIKSSLASDPKKLTEEQKVLLKEKPSPSERRVRNMLVADKKDWQYTQSARILQLAISDLGKAWNNFFDKAQPGWGKPKFRSKREARQGFKSDRSKIKDGILYLERARRSSVPKDQWCGFKLSEKPLSDEFGVVSYFKEKGRYYVAIPYKIKAEDVKLPDKTGKATAVDVNVGHFDYTGGRVNVLPKRLDRIYKKIKHYQRQLAKKRVKNGEAACESINYLKTKAKLQACYRKAGNIQNDLMHKFTTELINDYDKIVIENLSVKGMLMSHVASKGVHRSMFGKFRQILTYKCDWYGKELILANKLYPSTQRCAACGNVKKGDDKITLYGNKKHGTKHNEYICYNKKCPNYNKVVDRDKNAMLSLLALTEHPELNHAL

SEQ ID NO: 3911 - protein, 385 aa, unidentified
MIKTQVVKLKVNKTMQKHLDALCDYRRYCWNKGLETWQLMYEAHSLNKQDNPSPNERRVRDELVANKADWQYGLSARCLQLAVKDLANAWKNFFDKSQPDWGIPSFKSKKAPRQGFKTDRAKIVNGKLRLDKPRSISKEFWFDLVSYESLKMSEVKVVSIFKEKGSYYAALPYEEEISSKAKTHQETAVDVNVGHFNYTEGQINVLPAKLQKLYKRIKHYQRVLARKREVNGKLAAKSNNYFAVRTKLQRDYRKVANIQNDLLQKFTTKLIDNYDQIVVEDLAVKEMMMTHVASKGMQRSLFSKFRQIVTYKCDWYGKELILADKTYPSTQRCAQCGYVKKGDEKITLQGNQKHGTKHNEYVCYECGYSNDRDKNAVLNLLALAK

SEQ ID NO: 3912 - protein, 408 aa, unidentified
MTEQIEEVPAELIQTRVYELRPNETMRRVLDEACDYRRYCWNQGLALWNEMYKARQALKSSLASDSKKLTEEQKVLLKEKPSPSERRVRNMLVADKKDWQYTQSARILQLAISDLGKAWNNFFDKAQPGWCKPKFRSKREARQGFKSDRSKIKDGILYLERARGSRVPKDQWRGFKLSEKPLSDEFGVVSYFKEKGRYYVAISYKIKAEDVKLPDKTGKATAVDVNVGHFDYTGGRVNVLPKKLDRIYKKIKHYQRQLAKKRVQNGEAACESKNYLKTKAKLQACYRKASNIQNDLMHKFTTELVNDYDKIVIENLSVKGMLMSHVASKGVHRSMFGKFKQILTYKCDWYGKELILANKLYPSTQRCTTCGNVKKVMTRSPFMETRSMVLNTMSTSATTKNARTTIRS

SEQ ID NO: 3913 - protein, 432 aa, unidentified
MAEQVKEAPAELIQTRVYELCPNKTMRKVLDEACDYRRYCWNQGLDLWNEMYKARQTLKSSLSTDSKKLTEEQKVLLKEKPSPSERRVRNMLVADKKDWQYTQSARILQLAISDLGKAWNNFFDKAQPGWGKPKFRSKREARQGFKSDQSKIKDGILYLERAKESSVPKDQWRGFKLSEKPLSDEFGVVSYFKEKGRYYVAIPYKIKAEDIKLPDKTGKATAVDVNVGHFDYTGGRMNVLPKKLDKIYGKIKHYQRQLAKKQVKNGEAACESKNYLKTKAKLQACYRKTSNIQNDLMQKFTTELVNNYDKIVIENLSVKGMLMSHVASKGVHRSMFGKFKQFLTYKCDWYGKELILANKLYPSTQRCAACGNVKKGDDKITLYGNKKHGTKHNEYVCYNQKCPNYNKVVDRDKNAMLSLLALTEYPELNHAL

SEQ ID NO: 3914 - protein, 432 aa, unidentified
MAEQVKEAPAELIQTRVYELRPNKTMRKVLDEACDYRRYYWNQGLALWNEMYKARQTLKSSLSTDSKKLTEEQKVLLKDKPSPSERRVRNMLVADKKDWQYTQSARILQLAISDLGKAWNNFFDKAQPGWGKPKFRSKREARQGFKSDQSKIKDGILYLERAKESSVPKDQWRGFKLSEKPLSDEFGIVSYFKEKGRYYVAIPYKIKAEDIKLPDKTGKATAVDVNVGHFDYTGGRMNVFPKKLDKIYGKIKHYQRQLAKKQVKNGEAACESENYLKTKAKLQACYRKASNIQNDLMQKFTTELVNNYDKIVIENLSVKGMLMSHVASKGVHRSMFGKFKQFLTYKCDWYGKELILANKLYPSTQRCAACGNVKKGDDKITLYGNKKHGTKHNEYVCYNQKCPNYNKVVDRDKNAMLSLLALTEHPELNHAL

SEQ ID NO: 3915 - protein, 370 aa, unidentified
MSSPKEIRNYKFRIYPNKEQESKLTNWLTTCRIIYNSALADRKNYYERTGNGLTRIAQQETLKADKAKHPKVKEVHSQVAQEVLFRVERAYNNFFRRVQAGEKPGYPRYKGPGQYKSLTFTQFGDGLGASFQNDKLKLSKIGLVKIDLHREIHGQVKICTIKREQSGKWYAVLAVEEYPVLFSPNWQTIGLDVGIKEFAVLSNGEKIANPKHLQKSERKLKTLQRSLSRKKKGSKNRAKARNKLARQHEKIRHQRKDFHHKISDQLVWRYGKIVVEDLQITNMVQNHKLAKSISDAGWGEFISMLTYKAESAGRMVEKIPPYGTTQQCSRCGSIVKKDLSVRIHACPHCGLVLDRDHNAAINILHKSKAS

SEQ ID NO: 3916 - protein, 368 aa, unidentified
MKSYKTEVKPNKQQIIEINKTINACRSVYNKFIEVNKFRYDNGLKFLNHRKFSVWYNNDFIPNNKDKKWTKEVNTKATKQAMANAEDAYKRFFNNISGFPKFKKTQSNGSYYLIGTIHVERHRIRLPNLKWVKLKEKGYIPENNIKSATIIKENDRYYVSVLVDEEPKTILKKPHTEGIGIDLGLKDTLFTPSGGKITDLRKNKKLVKLHKSLKRQQRKLSRKQKKSNNWSKQLLKVQRLYRKISNIKKDIKQKKILEIVQENPQSITIENLNIKGMMKNKRLSNSFQQIGLGYIIEWLKWKCYQYDIELRQVDRFYPSSQICNQCGNRQKMPLNKRIYECDNCDMIEDRDINASINLKQAKEYTILL

SEQ ID NO: 3917 - protein, 406 aa, unidentified
MITLTYPFKLKVNRQQTQEIEHILSVCRSVYNYALAERKHWYNSRKSPVNSCSLISEYIIPANALYPSYNNQAKNLTVAKKTNQDLKSVNAQVLQQTLKTLDKAFSDMKSKGFGFPRFKKQMKSFVFPAMLKNCLAEGKVKLPQLGWLKIKQSRDYPTGFEAKQARIVKKATGYYLMIAFQSQESCPSAPVGKTSLGIDAGIESFVATDRGELIEAPKFLLKAQSKLKLLQRRLKHKIKGSNNWLKLQNKIAKLHEKVANTRRDWHFKLANYLCELTDNIFVEDINFTSWSRGIVRKQSLDSGIGQFINEILPFVCWKRSKFYLKVNKDGTSQECSNCGNHTGKKHLKERIHHCQYCGYTAPRDVVSAEVIKNRGLIAVGHTVNQNAYGDVLTGISQDLISLVKCL

SEQ ID NO: 3918 - protein, 407 aa, unidentified
MITLTYQFKLKLNRQQVNEVEHILDVCKSVYNYALAERKAYYNSRKSLVDRCSIVSEYIIPANAPYPNYHSQAKNLTIAKKTNQNLKSVNAQVLQQTLKTLDKAFSDMKSKGYGFPRFKKQMKSFVFPAMLKNCLGEGRIKLPQLGWLRIKQSRDYPTGFEPKQARIVKKASGYYLMIAFQSKESCYDAPVGKTSLGIDAGIESFIATDRGELIKAPKFLLQAQSKLKLLQRRLKHKIKGSNNWLKLQNKIAKIHEKVANTRRDWHFKLANYLCDLTDNIFVEDINFVSWSRGIVRKQSLDSGIGQFINEILPYVCWKRSKFYLKVDKNGTSQECSNCGNHTGKKHLGERVHNCQFCGYTAPRDVVSAKVIRNRGLIAVGHIVNQNAYGDVLTGIGQGNLLNLVKCL

SEQ ID NO: 3919 - protein, 407 aa, unidentified
MITLTYQFRLKLNRQQTQEVEHILSVCKSVYNYALAERKHWYNSRKSLVDRCSLFAEYIIPANAPYPNYNNQAKNLTIAKKTNPDLKSVNAQVLQQTLKTLDKAFSDMKAKGFGFPRFKKHTLSFVFPAMLKNCLGEGKVKLPQLGWLRIKQSRDYPTGFEPKQARIVKKATGYYLMIAFQSQESCPDAPVGKVSLGIDAGIESFIATDRGELIKAPKFLLKAQSQLKLLQRRLKHKIKGSNNWLKLQNKIAKIHEKVANTRRDRHFKLANYLCDLTDNIFVEDINFVSWSRGIVRKQSLDSGIGQFINEILPYVCWKRSKFYLKVDKNGTSQECSNCGTHTGKKHLNQRVHSCQYCGYTAPRDVVSAEVIRNRGLIAVGHTVSQNACGDVLTGFSQSNLTKLVKCL

SEQ ID NO: 3920 - protein, 407 aa, unidentified
MITLTYQFRLKLNRQQTQEVEHILTVCKSVYNYALAERKAWYNSRKSLVDRCSLFAEYIIPANAPYPSYNNQAKNLTIAKKTNPDLKSVNAQVLQQTLKTLDKAFSDMKSKGYGFPRFKKQMKSFVFPAMLKNCLGEGKVKLPQLGWLRIKQSRDYPTGFEPKQARIVKKASGYYLMIAFQSKESCYDAPVGKTSLGIDAGIESFIATDRGELIKAPKFLLQAQSKLKLLQRRLKHKIKGSNNWLKLQNKIAKIHEKIANTRRDWHFKLANYLCDLTDNIFVEDINFVSWSRGIVRKQSLDSGIGQFINEILPYICWKRSKFYLKVDKNGTSQECSSCGNHTGKKHLTQRIHSCQFCGHTAPRDVVSAEVIRNRGLIAVGHTVNQIAYRDVLTGIRQGNLLNLVKCL

SEQ ID NO: 3921 - protein, 407 aa, unidentified
MITLTYQFRLKLNRQQTQEVEHILSVCKSVYNYALAERKAWYNSRKSLVDRCSLFAEYIIPANAPYPSYNNQAKNLTIAKKTNPDLKSVNAQVLQQTLKTLDKAFSDMKSKGYGFPRFKKQMKSFVFPAMLKNCLAEGRIKLPQLGWLRIKQSRDYPTGFEPKQARIVKKASGYYLMIAFQSKESCYDAPVGKTSLGIDAGIESFIATDRGELIKAPKFLLQVHSKLKLLQRCLKHKIKGSNNWLKLQNKIAKIHEKVANTRRDWHFKLANYLCDLTDNIFVEDINFVSWSRGIVRKQSLDSGIGQFINEILPYVCWKRSKFYLKVDKNGTSQECSNCGNHTGKKHLGERVHNCQYCGYTAPRDVVSAEVIRNRGLIAVGHIVSKNAYRDVLTGIGQGNLLNLVKCL

SEQ ID NO: 3922 - protein, 407 aa, unidentified
MITLTYQFRLKLNRQQTQEVEHVLTVCKSVYNYALAERKAWYNSRKSLVDRCSLFAEYIIPANTPYPSYNNQAKNLTIAKKTNPDLKSVNAQVLQQTLKTLDKAFSDMKSKGYGFPRFKKHMKSFVFPAMLKNCLEEGKVKLPQLGWLRIKQSRDYPTGFEPKQARIVKKASGYYLMIAFQSQESCYDAPVGKTSLGIDAGIESFIATDRGELIKAPKFLLQAQSQLKLLQRRLKHKIKGSNNWLKLQNKIAKIHEKVANTRRDWHFKLANYLCDLTDNIFVEDINFVSWSRGIVRKQSLDSGIGQFINEILPYVCWKRSKFYLKVDKNGTSQECSNCGTHTGKKHLTQRIHNCQFCGYTAPRDVVSAEVIRNRGLIAVGHTVNQIAYRDVLTGIRQDNLLNLVKCL

SEQ ID NO: 3923 - protein, 407 aa, unidentified
MITLTYQFRLKLNRQQTKEVEHVLTVCKSVYNYALAERKAWYNSRKSLVDRCSLFAEYIVPADTPYPTYNNQAKNLTIAKKTNPDLKSVNAQVLQQTLKTLDKAFSDMKSKGYGFPRFKKHMKSFVFPAMLKNCLAEGRIKLPQLGWLRIKQSRDYPTGFEPKQARIVKKASGYYLMIAFQSKESCYDAPVGKVSLGLDAGIESFIATDRGELIKAPKFLLQVHSKLKLLQRRLKHKIKGSNNWLKLQKKIAKIHEKVANTRRDWHFKLANYLCNLTDNIFVEDINFVSWSRGIVRKQSLDSGIGQFINEILPYVCWKRSKFYLKVDKNGTSQECSNCGTHTGKKHLTQRVHSCQYCSYTAPRDVVSAEVIRNRGLIAVGHTVNQIAYRDVLTGIGQGDLLNLVKCL

SEQ ID NO: 3924 - protein, 413 aa, unidentified
MYYAYKYRLKPSDAHREELDRHRDICRQLYNHTLYRLNEYQDEHGDLPSMTTLRSEIPDLKKWWDGLSDVYSKVLQTVVERLFDNLKGLSKLKENGYAVGQLKWKPPREFRSFTYSQSGFKLDKKGGQTVLSLSKLADIPIRLHRAIPDDANLKQVTIKKEPTGEWFATFGVEMDREPPEPSENPEKCVGIDVGILKYAHDTDGTAVGSLDLSDERDRLEREKRKLSRKQHGSNNYEKQRRRVAECHADLRRKRRDFLHKLSAYYAREYDLVAVEDLNVKEMMETPSNSRNTASAAWRTFLSLLEYKCEREGTHFVAVNPRGTTKACASCGVSTDKPLWVREHSCPACGFEADRDANAAWNILSRGLEDVGVGYSESTPVETALPVDTPVSAKRVVEAGSPTLKERTASTVSE

SEQ ID NO: 3925 - protein, 432 aa, unidentified
MYYAYKYRLKPSNAHREELDRHRDICRQLYNHALYRFDQIPEDAGTLNQRVRSIRDEIPSLKEWWDGLSDVYSTVLQTAVMRIEQNVKGLSALKENGYGVGQLKWKPPREFRSFTYSQSGFKLDKKGGQTVLSLSKLADIPIRLHRAIPDVHKSDSSCAAHQKSLISEDDATLKQVTVKKEPTGEWFATFGVEMDREPPEPPENPENCVGIDVGILKYAHDTDGTAVGSLDLSDGRERLEREQRKLSRKQHGSNNYEKQRRRVAECHANLRRKRRDFLHKLSNYYAREYDLVAVEDLNVKGMMESPSNSRNTASAAWRTFISLLEYKCERVGTHFAAVNPRGTTKECAACGVSTEKPLWVREHSCPACGFEADRDANAAWNILSRGLENIGVGYSESTPVKTALPTGTSSVPAKRVVETGSPTLKRESQDAR

SEQ ID NO: 3926 - protein, 419 aa, unidentified
MNYNYRYRLTPTESQREMLDYHRDTCRQLYNHALYRFNQIPEDKGTVKQRVRTIRDELPNLKDWWDALTDIYSKVLQPTVMRIAKNINALGKLKKQGYNVGELRWKSPREFRSFTYNQSGFELDKKGGQIVLSLSKLADIPIKFHRPLPEDATVKEVTLKKEKTGEWFAIFGIEMDTEPPAKPPLANIDTDEMVGIDVGILKYAHDTDGTAVESLDLSEERDRLEREQRTFSRKAYESNNWEKQRRRVAACHFDIKRKRRDFLHKLSNYYAREYELVAVEDLDVKEMLESPRNSRNTASAAWNTFTDMLETKCEREGTHFVEVEPDGTTKECAQCGVETDKPLWVRKHSCPACGFEADRDANAAWNILSRGLTELGVGHSEGTPVETALPVGTTPVPAKRVLEAGSPTLSERVSASRVG

SEQ ID NO: 3927 - protein, 413 aa, unidentified
MYYAYKYRLKPSDAHREELDRHRDICRQLYNHTLYRLNEYQDEHGDLPSMTTLRSELPDLKKWWDGLSDVYSKVLQTVVERLFDNLKGLSKLKENGYAVGQLKWKPPREFRSFTYSQSGFKLDKKGGQTVLSLSKLADIPIRLHRAIPDDANLKQVTIKKEPTGEWFATFGVEMDREPPEPSENPEKCVGIDVGILKYAHDTDGTAVGSLDLSDERDRLEREQRKLSRKQHGSNNYEKQRRRVAECHADLRRKRRDFLHKLSAYYAREYDLVAVEDLNVKDMMETPSNSRNTASAAWRTFLSLLEYKCEREGTHFVAVNPRGTTKACASCGVSTDKPLWVREHSCPACGFEADRDANAAWNILSRGLEDVGVGYSESTPVETALPVDTPVSAKRVVEAGSPTLKERTASTVSE

SEQ ID NO: 3928 - protein, 427 aa, unidentified
MNYNYRYRLTPTDSQRETLDYHRDTCRQLYNHALYRFNQIPESEGTVKQRVRNIRDELPNLKDWWDALTDVYSKVLQPTVMRIAKNIKRLGQLKKQGYKVGELRWKSPREFRSFTYNQSGFELDKKGGQTVLSLSKLADIPIELHRPLPDDATVKQVTLKKEKTSEWFAIFGIEMDTKSPAKSSLENIDTAEMVGIDVGILKYAHDTDGTAVESLKLSEERDRLEREQRNLSRKEHGSNNWENQRRRVAECHFDIKRKRRDFLHKLSAYYAREYELVAVEGLDVKGMLASPRNSRNTASSAWNTFTDLLEYKCKREGTHFVEVDPGGTTKECAQCGVETDKPLWVREHSCPACGFEADRDANAAWNILSRGLTDLGVGHSELPPVETALAVDTAVVSAKRVVEAGTSFRKERSPCLKEPPKAASRQG

SEQ ID NO: 3929 - protein, 355 aa, unidentified
MKTLKLRIKDKHCKVLDQLASEVNFVWNYVNDLCFKHLQRKGQFFSAYDVAKYTKGTSKECNLHSQTIQAVTEELVIRRKQFKKAKLKWRVSNKKSARCSLGWIPFKKVAVKYANGYIQYGKHQFKLWDSYGLSKYTVKTGSFVEDSRGRWYVCLVVDSPKQEKPTETKAIGIDLGLKDIAACSDGTVIFNPKFYRQYEQKLGIAQRAKNKKRVRALHAKIKNCRKDHLHKASSMLVKNNALIVIGDLSAQKLVKTKMAKSVLDTGFSALKTMLTYKCENAGVLFEEVSENFTTQVCSSCGEITASSPKGRADLRIREWRCCNEKCLSLNDRDINAALNILALGHKRLAVGISLF

SEQ ID NO: 3930 - protein, 353 aa, unidentified
MKTLKLRIKDKHRKVLDQLASEVNFVWNYVNDLGFRHLKRKGEFLSAFDIAKYTKGTSKECNLHSQTIQAVTEELVTRRKQFKKAKLKWRVSNKKSARRSLGWIPFKKVAIKYANGYVQYGKHQFKLWDSYGLSKYTLKTGSFVEDSRGRWYVCLVVESPKQDKSTATKAIGIDLGLKDIATCSDGTVISNPKFYRKYEQKLGIAQRARNKKRVRALHAKIANSRKDHLHKASTKLVNENALIIVGDLSAKKLVKTKMAKSVLDTGFSALKTMLKYKCENAGVLFEEVQEAYTTQICSCCGEITSSSPKGKTDLGIREWECMSCGTAHDRDINSALNILALGHKRLAVGITLF

SEQ ID NO: 3931 - protein, 353 aa, unidentified
MKTLKLRIKDKHCKVLDQLASEVNFVWNYVNDLGFRHLKRKGEFLSAFDIAKYTKGTSKECNLHSQTIQAVTEELVTRRKQFKKAKLKWRVSNKKSARRSLGWVPFKKVAIKYATGYVQYGKHQFKLWDSYGLSKYTLKTGSFVEDSRGRWYVCLVVESPKQDKSTATKSIGIDLGLKDIATCSDGTVISNPKFYRKYEQTLGIAQRARNKKRVRALHAKIANSRKDHLHKASTKLVNENALIIVGDLSAKKLVKTKMAKSVLDTGFSALKTMLKYKCENAGVLFEEVQEAYTTQICLCCGEITSSSPKGSTDLGIREWECMSCGTVHDRDINSALNILALGHKRLAVGITLF

SEQ ID NO: 3932 - protein, 353 aa, unidentified
MKTLKLRIKDKHCKVLDQLASEVNFVWNYVNDLGFRHLKRKGEFLSAFDIAKYTKGTSKECNLHSQTIQAVTEELVTRRKQFKKAKLKWRISNKKSARRSLGWVPFKKVAIKYATGYVQYGKHQFKLWDSYGLSKYTLKTGSFVEDSRGRWYVCLVVESPKQDKSTATKSIGIDLGLKDIATCSDGTVISNPKFYRKYEQTLGIAQRARNKKRVRALHAKIANSRKDHLHKASTKLVNENALIIVGDLSAKKLVKTQMAKSVLDTGFSALKTMLKYKCENAGVLFEEVQEAYTTQICLCCGEITSSSPKGSTDLGIREWECMSCGTVHDRDINSALNILALGHKRLAVGITLF

SEQ ID NO: 3933 - protein, 370 aa, unidentified
MSSPKEIRNYKFRIYPNKEQESKLTNWLTTCRIIYNSALADRKNYYERTGNGLTRIAQQETLKADKAKHPQVKEVHSQVAQEVLFRVERAYNNFFRRVQAGEKPGYPRYKGPGQYKSLTFTQFGDGLGASFQNDKLKLSKIGLVKIDLHREIHGQVKICTIKREQSGKWYAVLAVEEYPVLFSPNWQTIGLDVGIKEFAVLSNGEKIANPKHLQKSERKLKTLQRSLSRKKKGSKNRAKARNKLARQHEKIRHQRKDFHHKISDQLVWRYGKIVVEDLQITNMVQNHKLAKSISDAGWGEFISMLTYKAESAGRMVEKIPPYGTTQQCSRCGSIVKKDLSVRIHACPHCGLVLDRDHNAAINILHKSKAS

SEQ ID NO: 3934 - protein, 370 aa, unidentified
MSSPKEIRNYKFRIYPNKEQESKLTNWLTTCRIIYNSALADRKNYYERTGNGLTRIAQQETLKADKAKHPKVKEVHSQVAQEVLFRVERAYNNFFRRVQAGEKPGYPRYKGPGQYKSLTFTQFGDGLGASFQNDKLKLSKIGLVKIDLHREIHGQVKICTIKREQSGKWYAVLAVEEYPVLFSPNWQTIGLDVGIKEFAVLSNGEKIANPKHLQKSERKLKTLQRSLSRKKKGSKNRAKARNKLARQHEKIRHQRKDFHHKISDQLVWRYGKIVVEDLQITNMVQNHKLAKSISDAGWGEFISMLTYKAESAGRMVEKIPPYGTTQECSRCGSIVKKDLSVRIHACPHCGLVLDRDHNAAINILHKSKAS

SEQ ID NO: 3935 - protein, 385 aa, unidentified
MLKSFKTEIDPTLEQKQKIHQTIGTCRFVYNFYLSHNKEVYEAEKKFVSGMDFQKWLNNVYLKEHPEFSWIKDVSSKSVKQSIMNADKAFRNFFKHQTGFPKFKKKGTSDVKMYFVKTDAKAVIYCERHRIKIPTLGWVRLKEKGYLPTTKSGMVIKSGTVSMKAGRYYSSVVVEIPDTPSVKNNENEGIGIDLGLKDLAIVSDGKAYKNINKSAKIKKLEKRLRREQRSLSRKLENTKKGESTQKNIQKQKLKVQKLHQRMDNIRTDYINKTVSEIVKTKPSYITVEDLNVTGMMKNKHLSKAVASQKFYEFRVKLEAKSKERGIELRIADRWYPSSKMCHCCGSIKKDLKLSDRVFRCQCGYVENRDLNASLNLRDATTYSIA

SEQ ID NO: 3936 - protein, 432 aa, unidentified
MAEQIEEVPAELIQTRVYELHPNKTMRRVLDEACDYRRYCWNQGLALWNEMYKARQTLKSSLSTDSKKLTEEQKVLLKDKPSPSERRVRNMLVADKKDWQYAQSARILQLAISDLGKAWNNFFDKAQPGWVKPKFRSKREARQGFKSDQSKIKDGILYLERAKESSVPKDQWRGFKLSEKPLSDEFGVVSYFKEKGRYYVAIPYKIKAKDIKLPDKTGKATAVDVNVGHFDYTGGRINVLPKKLDKIYGKIKHYQRQLAKKQVKNGEAACESENYLKTKAKLQACYRKASNIQNDLMQKFTTELVNNYDKIVIENLSVKGMLMSHVASKGVHRSMFGKFKQFLTYKCDLYGKELILANKQYPSTQRYAACGNVKKGDDKITLYGNKKHGTKHNEYVCYNQKCPNYNKVVDRDKNAMLSLLALTEHPELNHAL

SEQ ID NO: 3937 - protein, 457 aa, unidentified
MMSEERRNKIKNSLKLTKEKRKTQDVIILKLKIDNDKLNNNTIKALNTMFLETKWLYNYILDKEFNNDIFKFDYKTNYANVYVKDHYERRKINYLSAQMKQDLLKRTENNISGLHELKENGFKTGKLKFKKEINSIPLRQFGKGKTYNIINNFNYIKIQRIEQPLKVNGFYETFTDNENIKHKELKYDFNNLDFGNAMLIHKNNNYYINITAYTKKEERNNNRIIGIDSGIKTQLTLSNGLKLEYNIPKSKREIRLQRELSRKAKYAEGSKKKLSGEQSKNYNKNKNRLNREQQKRNNKKRDVKNKIVHYITSNYNIIITQNDNISGWQKLFGKKIENTGIGSIIEALKSKASNLIPVGRFIPTTKECNNCHNKYDIKLNERIYKCSNCGYIIDRDYNSSLNMIYYGMKTKKFKNTVPEDSREFTPGETLTDTFEGLNTPYVKASYVDEPGSFNALA

SEQ ID NO: 3938 - protein, 463 aa, unidentified
MMPEERRNKIKNSLRITGERRKTQDVIILKLKIDNDKLNNNTIKALNTMFLEAKWLYNYILNKEFNNDIFNIDSKIKNVNVYVKDHYETRELKYLSSQMKQEIINRAKDNINGLHKLKEKGFKVGKLKFKSFITSIPLNQYTITYKIINNNYIKIQDIKQLLKVNGLDNLECYYEPANALLINNNNNNYYINITAYKNKYILEKPVNNQKILSFDLGIKNQLTCSNGLILNYNIPKSKKEKRLQRSLSRKAEYVEGSKNKLSKKQSKNYYKNKNRLNREQDRTKNKRKDTINKITHYLTSNYDIVVTQNDNISGWQRLFGKKIESTGIGGIIDALKHKASTLILIDRFIPTTKECSNCHNKYNIKLDERIYKCPNCGFIIDRDYNSALNMIYYGIIKLNELLKIKNKKLNNYFKKYNINLNVPMERRELTPVEIIASGFEGLNISPYVKLSMVNEAGSLYALA

SEQ ID NO: 3939 - protein, 420 aa, unidentified
MNYNYRYRLKPTEDQRETLDYHRDTCRQLYNHALYRFNQIPEDEGTVKQRVRKIRDELPDLKDWWDALTDVYSKVLQPTVMRVAKNVKALGNLKEQGYKVGELRWKSPREFRSFTYNQSGFELDKKSGQTVLSLSKLAAIPIEFHRPLPDDATVKEVTLKKEKTGEWFAIFGIEMDTEPPAKPPLEDIDTDEMVGIDVGILKYAHDTDGTAVESLDLSEERDRLEWEQRKLSRKERGSNNWENQRRRVAECHLAIKRKRNDFLHKLSNYYAREYELVAVEDLEVKGMLESPRNSRNTASAAWTTFTDMLETKCEREGTHFVEVDPDGTTKECAQCGVETDKPLWVREHSCPACGFEADRDANAAWNILSRGLTELGVGHSEETPVETALPAGTTPVPAKRVVEAGSPCLKEPPKAASRQG

SEQ ID NO: 3940 - protein, 422 aa, unidentified
MRLQRGHKARLDLTRDQAALVEDQGHAARALWNLLHDWWTMASENRRVPLADADAAIKQARKDIPWLAALPAQAAQQVLKTYFNAWRACWAGQRAEPRFKARMRTRAAIDVPQGRDLQIVRLNRRWGQVKIPKVGRVKFRWTRDLPIGKQANKDNRITGARLVREVHGWHIVFRVQRQVEDPAPHEGPTVGIDRGIAKPLALSDGTFREHGPWMTDGETERLRRLEKKAARQRRARKQGERTSNRLKRTYDQICGLRARAKRRALDWQHKTTTELARGFSRIGVEDLNIQGMTRSARGSVETPGTQVRQKAGLNRAIAGQAWGRTVTLLEYKTAERGGAVVRVAARGTSQRCSVCGFITSGNRESQDRFVCKNPTCGHSGNADTNAANNIDHAAGLAVSVRGDLAGRRSEKREPPESPPQAA

SEQ ID NO: 3941 - protein, 369 aa, unidentified
MLRAYKVEIQPNNEQIEIIQQTIGTCRWVYNKFIEINQIRYKNKLKYMSGYDFSKWFNNDFIPNNPDKLWIKESASKSVKQSIMNAHRAYQDAFKKQKGFPKFKKKQSNGSYYLIGAIKVERYRIKLPNLKWVRLKEKGYIPKHNIKSATISKEFDRYYVSVLVDEEPKIIFKKPQTEGIGIDLGLKDTLFTPSGVKITDLRKNKRLIKINKSLKRQQRKLSRKQKKSNNWFKQLLKVQRLYRKISNLKRDIKRKNILSIVQENPQFITIENLNIKGMMKNKRLSNAFQQIGLGYIVEWLKWKCYQYGIELRQVDRFYPSSQICNQCGNRQKMPLNKRVYKCENCGTIEDRDINASINLKQAKDYTVIV

SEQ ID NO: 3942 - protein, 421 aa, unidentified
MNYAYRYRIHPTESQRETLDHHLDTCRQIYNHTLHELNNIPESAGTVNQRVNKVIKQLPDLKEWWDELTELYSTVSQDAAKRVAKNIIRLSGAKQNGLKVGSLNWKSPREYQSFTYVQSGFEFDNKNGQTVLSLSKLADIPLSYHRDISETVNIKRVTLKREPTGEWYASFAVDEKEEPAKPDDPQRCVGIDVGILKYAQDTDGRAVGFPDLQDNRERLRREQRALSRKEQGSNNWEKQRQTVAEYYQTLRRKCHDFLHKLSNYYATQYDLVAVEDLDVKSMLKSSGNSRKTAFAAWDTFTTMLEYKCKREGTHFVEVEPAGTTKECASCSVETKKPLCVREHSCPACGFEMDRDANAAINILSRSFKKLGLGQSEDTTPVETALPMFTSSGSVDVVDGKRVIESGSPTLHPRGTNRESGE

SEQ ID NO: 3943 - protein, 418 aa, unidentified
MHYAYRYRLHPTEAQRETLNFHRDTCRQLYNHALTEFEQIPQSAGTLTQRVRQVRDQLPDLKDWWDDLTELYSTVAQAAVMRIEDAIEALSELKTKGYDVGSLNWKSPREYRSFTYVQKGFEFDKKNGQTVLSLKTLADIPLSYHREIPDDLTVKEVSIKQERTGEWDASFAVDDKEEPAKPENPARCVGIDVGILKYAHDTDGCAVGSLDLQHEQERLKREQRSLSRKQHGSNNWEKQRLKVAKRHQKVRRKRHDFLHKLSNYYATEYDMVAVEDLDVKPMLESTGNSQNTASAAWDTFTTLLEYKCKREGTHFVEVDPAGTTKQCASCGVGSDKPLWVREHSCPACGFEMDRDANAAINILFRGFEKLGLGQSEETTPVETALPLFTSSDGADVVDGKRVVETGSPTLKEAATAAE

SEQ ID NO: 3944 - protein, 416 aa, unidentified
MHYTYKYHLDPTASHREQLDFYRDTCRQLYNHALREFNKIPESAGTLTQRVRQVRDQLPDLKDWWDDLTDLYSTVTQAAVMRIERSVKALSGLKQQGYKMGSLNWKAPQDFRSFSYVQKGFEFDRKDGHTVLSLKKLADIPVVKHREIPDTETVKEVTLKKEATGEWFACVTVDSKETPEKPGNPERCIGIDVGILKYAHDTDGRTIGSLGLSDDRERLQREQRKLSRKEHGSHNWEQQRQKVAECHQKMKRKRRDFLHKLSNYYASQYDLVAVEDLHIKSMLESPGNSRNTASAAWDTFTTLLAYKCKREGTHFVEVDPAGTTKECASCGVATDKPLWVREHSCPACGFEMDRDANAALNILSRGFEQRGVVHSESPPVETALPLFTSSESSDVVDGKRVVESGSPSLTESRVSG

SEQ ID NO: 3945 - protein, 419 aa, unidentified
MHYAYRYRLHPTEAQRETLEYHLDTCRQLYNHALTKFEQIPESSGTLKQRVRQVRDRLPELKDWWDDLNDLYSTVSQTAVMRIEDSVTAVSQLKQNGYNVGSLNWKAPREYQSFTYTQSGFEFDKKNGQTVLSLSKLADIPIIRHREIPDTVTIKSVTVKKERTGEWYASFAVDDKEEPAKPDDPQKCIGIDVGILKYAQDTDGRAVGFPDLQDNRDRLRREQRALSRKEHGSSNWEEQRQTVAECHQTLRRKRHDFLHKLSNYYATQYELVAVEDLDVMSMLKSSGNSRNTALAAWDTFTTFLEYKCKREGTYFVEVEPSGTTKQCASCGVRTDKPLWVREHSCPACGFKMDRDANAAINILSRGFKKRGLGQSEETPVETALPLFTSSGSVDVMDGKRVIETGSPTLRERTAKAVSE

SEQ ID NO: 3946 - protein, 369 aa, unidentified
MHYAYRYRLHPTESQQEKLDQHRDTCRQLYNHALTEFDHIPESAGTLNQRVRQVRDQLPDLTDWWDTLNDLYSTVAQATVMRIEDSVKALSQLTENGYTVGSLNWKSPREYRSFTYVQSGFEFDNKNGQTVLSLSKLVDVPISYHREIPEDVTVKEVSIKKERTGEWYASFAVEGKAEPAKPANPDRCVGIDVGILKYAHDTDGRAVGSLNLRDERERLKREQRSLSRKQQGSNNWEKHRLRVAECHQQLRRKRHDFLHTLSKYYATEYDLVAVEDLDVKGMMESAGNSQNTASAAWETFTTLLEYKCTREGTHFAEVGPAGTTKECASCGVESDKPLWVREQSCPACGFEMDRDANAALNSLSRGFEK

SEQ ID NO: 3947 - protein, 418 aa, unidentified
MRYTYRYQLNPTDSQREQLDLYRDTCRQLYNHALKEFNEIPKSAGTLNQRVRQVRDQIPDLKDWWDDLNDLYSTVTQAAVMRIEHSIKALSELQNQGYKVGSLNWKAPQDFRSFTYVQKGFEFDSKDGHTVLSLKKLADIPVVKHREIPDTETIKQITIKKEPTGEWFACVTVDGKETPEKPENPDRCVGIDLGILKYAHDTDGRTIGSLDLSQERERLQREQRKLSRKEHGSHNWEQQRQKVAECHQQIKRKRHDFLHKLSNYYATEYDFVAVEELNIKSLLESSGNSQNTASAAWDTFTTLLKYKCKREGTHFVEVDPAGTTKECASCGVATDKPLWVREHSCPACGFEMDRDANAAINILSRGFDKLGVVHSEATPVETALPMFAPDSESGADTKRVIETGSPTLKERTASAVSE

SEQ ID NO: 3948 - protein, 418 aa, unidentified
MHYAYRYRLHPTESQREKLDYYRDTCRQLYNHALTEFEQIPHSAGTLNQRVRQVRDELPDLKDWWDNLTDLYSTVAQAAVMRIEDSVKALSQLKENGYNVGSLNWKSPSEFRSFTYVQSGFEFDKKNGQTVLSLSKIGDIPITVHREIPDSVTVKEVSIKKERTGEWDASFAVEGREKPPKPENPDRCVGIDVGILKYAHDTDGRAVGSLDLKNERERLKREQRSLSRKQHGSNNWEKQRLRVAECHQRVRRKRRDFLHKLSKYYATEYGLVAVEDVNVKPMLESAGNSQNTASAAWETVTTLLEYNCKREGTHFVAVEPAGTTKECASCGVESDKPLWVREHSCPACGFEIDRDANAAINVLSRGFEKRGLGQSEAVTPVETALPLFTSSDGADVVDGKRVLETGSPTLTEAATAAE

SEQ ID NO: 3949 - protein, 419 aa, unidentified
MHYAYRYRLHPTEAQRETLDHYRDTCRQLYNHALTEFEHIPNSAGTLNQRVRQVRDQLPDLTDWWDELNDLYSTVAQAAVMRIEDSIKSLSELKQNGYNVGSLNWKAPSEFRSFTYVQSGFEFDNKNGQTVLSLSKLADIPLTVHREIPEDVSIKEVCIKKERTGEWYASFAVEDKEEPAKPENPDRCIGIDVGILKYSHDTDGRAVGSLDLQDERERLKREQRSLSRKQHGSHNWEKQRVRVAECHQQLTRKRHDFLHTLSNYYATEYDMVAVEDLDVKSMMESAGNSQSTSSAAWDTFTTLLEYKCKREGTHFAEVEPAGTTKECASCGVASEKPLWVREHSCPACGFEMDRDANAAINILSRGFEAIGLGQSEATPVETALPLFTSSGAFDVVDGKRVIETGSPTLRERTAKAVSE

SEQ ID NO: 3950 - protein, 326 aa, unidentified
MSYLSGYDFHKWLNKEYIPNNPNKIWIKEVYSKSTARAMQNADRAYKDFMRGNRGRPRFKKKQTNGSYYLWGNMEVERHKIKLPKLKWVKLKRKGYIPTNLKVVSATLTKEVDRYYISVMFEEDLKSIFKKPQTEGIGIDLGLKDTLFTPSGVHITDLRKNKRLIKLNKSLKRQQRKLSRKQKKSNNWFKQLLKIQRLYRKINNIKKDIKQKKVLEIVKENPQFITIENLNIKGMMKNRRLSNSFHQVGLGYIIEWLKWKCYQYGIELRQVDRFYPSSQICNQCGNKQKMPLNKRLYECKNCGMIEDRDINASTNLKQAKEYTVLV

SEQ ID NO: 3951 - protein, 414 aa, unidentified
MLNRAFRYKLKVDAAQDSVFRQYAGVVRLIYNVALEQRSVFWRQHLARTGKAISVTTQCRELTALRAEYDWIRALHVTPQQQALRDLDKALGNFFAGRADYPKPRSRRENNAFRFQGREVDVETLSRKWARVRLPKIGWVKFRLTRPLRGTIKNVTVALDPLGWHVSFACAIEHEAAESNLPDVGMDRGVAITAVLSSGDRLRIPGSLALIEKRRRQAQKIVARRKRGSNRRAKALRRVAKLSAKSARIRRHWQHRVSQNLASRFGTVVVEDLKVRNMTASAAGTVAEPGRSVRQKSGLNRSILEQGWHSLTTLLEYKLSEHGGHLVAVDPRYTSQTCSSCGVVDPRSRKSQARFQCVHCGFRAHADYNAAVNVLRRNTAPMLVEGCGCAPVEARTGRSRMAPENPPPSGGGRC

SEQ ID NO: 3952 - protein, 432 aa, unidentified
MAEQVKEAPAELIQTRVYELRPNKTMRKVLDEACDYRRYCWNQGLALWNEMYKARQTLKSSLSTDSKKLTEEQKVLLKDKPSPSERRVRNMLVADKKDWQYTQSARIPQLAISDLSKAWNNFFDKAQPGWGKPKFRSKREARQGFKSDQSKIKDGILYLEQAKESSVPKDQWRGFKLSEKPLSDEFGVVSYFKEKGRYYVAIPYKIKAEDIKLPDKTGKATAVDVNVGHFDYTGGRMNVLPKKLDKIYGKIKHYQRQLAKKQVKNGEAACESENYLKTKAKLQACYRKASNIQNDLMQKFTTELVNNYDKIVIENLSVKGMLMSHVASKGVHRSMFGKFKQFLTYKCDWYGKELILANKLYPSTQRCAACGNVKKGDDKITLYGNKKHGTKHNEYVCYNQKCPNYNKVVDRDKNAMLSLLALTEHPELNHAL

SEQ ID NO: 3953 - protein, 413 aa, unidentified
MINLTYEFRLDVNRQQELEIEHIFDVCRSVYNYALAERKHWLRSRKSPVNSCSIVSEYIIPAEQPYPNYHVQAKNLTIAKQNNQDLKSVNAQVLQQTLKTLDKAFTDMKSQGRGFPRYKKKMRSFVFPAMLKNCLAIGKVKLPQLGWLKIRQSREYPIGFVPKQARIVKKASGYYLLIVFQSQEVCPDIPIGKTSLGLDAGIESFVATSTGVLIKAPKFLLKASSKLKSLQRRLKHKNKGSNNWLKLQDKIGRLHEKVSNARKDWHFKLAHALCDLGENIFIEDINYTAWSRGIVRKPSLDSGIGGFMNEILPYVCWKRDRFYLKVDKNGTSQECPNCGKHTGKKLLSERVHNCQYCGHTEPRDIASAKVIKNRGLIAVGHTVSENACEVPLIGSDVLAGFEQLTLFELVKCH

SEQ ID NO: 3954 - protein, 413 aa, unidentified
MINLTYEFRLDVNRQQELEIEHIFDVCRSVYNYALAERKHWLRSRKSPVNSCSIVSEYIIPAEQPYPNYHVQAKNLTIAKQNNQDLKSVNAQVLQQTLKTLDKAFTDMKSQGRGFPRYKKKMRSFVFPAMLKNCLAIGKVKLPQLGWLKIRQSREYPIGFVPKQARIVKKASGYYLLIVFQSQEVCPDIPIGKTSLGLDAGIESFVATSTGVLIKAPKFLLKASSKLKSLQRRLKHKNKGSNNWLKLQDKIGRLHEKVSNTRKDWHFKLAHALCDLGENIFIEDINYTAWSRGIVRKPSLDSGIGGFMNEILPYVCWKRDRFYLKVDKNGTSQECPNCGKHTGKKLLSERVHNCQYCGHTEPRDIASAKVIKNRGLIAVGHTVSENACEVPLIGSDVLAGFEQLTLFELVKCH

SEQ ID NO: 3955 - protein, 410 aa, unidentified
MVTLRKVSEGTGHARYTYRLRVSSTARTGLMAEWARCRWVWNECVAVSRKRHHANRTRPDGAPKVTCGPAELDKMLTEARAKLPWLREGASVPQQQTIRDFAKSRAKAQKDIKDRLPMHRRAGMPKAKEKREALPTLNYTTRGFRVKDGRLHLAGGISLTVMWSRDLPSAPSSVRVYRDSLGHWYCSFVVAVETQPLPATGRVLGVDWGVKETATTTSDDHDLPHAQHGKTAAQKLARYQRMMARRRPAKGQAASKGYREAQAQTAKLHKKVARRRQDAARKWAKRVVRDHDAIAVEDFKPKFLAKTTMARKAADAAIGATKTALIEMGRKHGRDVRLVHPAHTTMDCAQCGARTKHALPLSERTYTCTACGAVSPRDKNSARVMLVRAGLNPAGAEGVSPPGALLPEAA

SEQ ID NO: 3956 - protein, 432 aa, unidentified
MAEQVKEAPAELIQTRVYELRPNKTMRKVLDEACDYRRYCWNQGLALWNEMYKARQTLKSSLSTDSKKLTEEQKVLLKDKPSPSERRVRNMLVADKKDWQYTQSARILQLAISDLGKAWNNFFDKAQPGWGKPKFRSKREARQGFKSDQSKIKDGILYLERAKESSVPKDQWRGFKLSEKPLSDEFGVVSYFKEKGRYYVAIPYKIKAEDIKLPDKKGKATAVDVNVGHFDYTGGRMNVLPKKLDKIYGKIKHYQRQLAKKQVKNGEAACESENYLKTKAKLQACYRKASNIQNDLMQKFTTELVNNYDKIVIENLSVKGMLMSHVASKGVHRSMFGKFKQFLTYKCDWYGKELILANKLYPSTQRCAACGNVKKGDDKITLYGNKKHGTKHNEYVCYNQKCPNYNKVVDRDKNAMLSLLALTEHPELNHAL

SEQ ID NO: 3957 - protein, 432 aa, unidentified
MAEQIEEVPAELIQTRVYELHPNKTMRRVLDEACDYRRYCWNQGLALWNEMYKARQTLKSSLSTDSKKLTEEQKVLLKDKPSPSERRVRNMLVADKKDWQYAQSARILQLAISDLGKAWNNFFDKVQPGWGKPKFRSKREARQGFKSDQSKIKDGILYLERAKESSVPKDQWRGFKLSEKPLSDEFGVVSYFKEKGRYYVAIPYKIKAKDIKLPDKTGKATAVDVNVGHFDYTGGRINVLPKKLDKIYGKIKHYQRQLAKKQVKNGEAACESENYLKTKAKLQACYRKASNIQNDLMQKFTTELVNNYDKIVIENLSVKGMLMSHVASKGVHRSMFGKFKQFLTYKCDWYGKELILANKQYPSTQRCAAYGNVKKGDDKITLYGNKKHGTKHNEYVCYNQKCPNYNKVVDRDKNAMLSLLALTEHPELNHAL

SEQ ID NO: 3958 - protein, 432 aa, unidentified
MAEQIEEVPAELIQTRVYELHPNKTMRKVLDEACDYRRYCWNQGLALWNEMYKARQTLKSSLASDSKRLTEEQKVLLKEKPSPSERRVRNMLVADKKDWQYAQSARILQLAISDLGKAWNNFFDKAQPGWGKPKFRSKREARQGFKSDRSKIKDGILYLERARRSSVPKDQWRGFKLSEKPLSDEFGVVSYFKEKGRYYVAIPYKIKAEDVKLPDKTGKATAVDVNVGHFDYTGGRVNVLPKRLDRIYKKIKHYQRQLAKKRVKNGEAACESINYLKTKAKLQACYRKAGNIQNDLMHKFTTELINDYDKIVIENLSVKGMLMSHVASKGVHRSMFGKFKQILTYKCDWYGKDLILANKLYPSTQRCAACGNVKKGDDKITLYGNKKHGTKHNEYICYNKKCPNYNKVVDRDKNAMLSLLALTEHPELNHAL

SEQ ID NO: 3959 - protein, 432 aa, unidentified
MAEQIEEVPAELIQTRVYELHPNKTMRRVLDEACNYRRYCWNQGLALWNEMYKARQTLKSSLSTDSKKLTEEQKVLLKDKPSPSERRVRNMLVADKKDWQYAQSARILQLAISDLGKAWNNFFDKAQPGWGKPKFRSKREARQGFKSDQSKIKDGILYLERAKESSVPKDQWRGFKLSEKPLSDEFGVVSYFKEKGRYYVAIPYKIKAKDIKLPDKTGKATAVDVNVGHFDYTGGRINVLPKKLDKIYGKIKHYQRQLAKKQVKNGEAACESENYLKTKAKLQACYRKASNIQNDLMQKFTTELVNNYDKIVIENLSVKGMLMSHVASKGVHRSMFGKFKQFLTYKCDWYGKELILANKQYPSTQRCAAYGNVKKGDDKITLYGNKKHGTKHNEYVCYNQKCPNYNKVVDRDKNAMLSLLALTEHPELNHAL

SEQ ID NO: 3960 - protein, 402 aa, unidentified
MGVGEGSRVRYTYRLRVSSTARVALEAEWARCRWVWNECVAKSKQVQERGRRTGVKETCGPAGLDRMLTEARRVMPWLREGSSVPQQQMIRDFGKARAKALKNIADRLPVNRRAGMPKLKKKRDTSLSLNYTTRGFQLREGRLHLAKGIALTVVWSRELPSRPSSVRVYRDSLGHWYASFVVATSAEVLPATGAVIGIDWGVAETATTTSDAHDLPHAEFGSRAAQRLARYQRQMARRKPKHGQPNSRGYKESQRQAAKAHKKVARQRQDTGRKWAKRVVTDHDVIAVEDFKPTFLTKTTMARKAADAAIGATKAALVAMARKHGRDLRLINPAHTTMDCAQCGTRAKHRLPLSERTYTCTACGASSPRDRNSARVMLVRAGLNPAGAEGVRPVGALLPQAA

SEQ ID NO: 3961 - protein, 286 aa, unidentified
MLTGRRYLLRLTSRQQDQAEQFGNACRAVWNAGPEQRREYRRRGGSIGYVEQGRQLAEAKKDPYSAWPAEAPSHILQQTLRDLDRACETHGTGKVRWRPKTKTRPASRFPDPKQMEMVRLTRRWGQVKLPKLGWVRLRWTRPSGGVLRNATVLRDGGRWYVSFCVDDGVAPAAPDKLPPIGVDRGAVAAVATSEGGLIDREFATAGEVRRAKRLQQRLTRCHDCGHIARKNRENQAVFRCVACGHADHADVNAAKNILAAGLAVTGRGDLAIGRSRKRQPPVEVAA

SEQ ID NO: 3962 - protein, 402 aa, unidentified
MGVGEGSRVRYTYRLRVSLTARVALEAEWARCRWVWNECVAKSKQVQERGRRTGVKETCGPAGLDRMLTEARRVMPWLREGSSVPQQQMIRDFGKARAKALKDIADRLPVNRRAGMPKLKKKRDTSLSLNYTTRGFQLRDGRLHLAKGIALTVVWSRELPSRPSSVRVYRDSLGDWYASFVVATSAEVLPATGAVIGIDWGVAETATTTSDAHDLPHAEFGSRAAQRLARYQRQMARRKPKHGQPSSRGYKESQRQAAKAHKKVARQRQDTGRKWAKRVVTDHDVIAVEDFKPTFLTKTTMARKAADAAIGATKAALVAMARKHGRDLRLINPAHTTMDCAQCGTRAKHRLPLSERTYTCTACGASSPRDKNSARVMLVRAGLNPAGAEGVRPVGALLPQAA

SEQ ID NO: 3963 - protein, 395 aa, unidentified
MGEAVGHARYTYRLRVSATARVGLEDEWGRCRWVWNECVARAKRAYAEGEVCGPARLDRMLTRARAVAPWLAKGASVPQQQIIRDFAASRTKALKDIKNRLPLKRRAGMPRHKKLRRTDPSLNYTRRGFRLRDGRLHLAGGIVLTVVWSRPLPAEPSSVRVYRDAVGHWYASFVLPAPIDPLPSTGAVIGIDWGVRETATTTSDTHDLPHPRHGRKAQEKLSRYDRMMARRKPAKGQAASKGYREAKRWRAKTYARIARQRQDTARKWAKKVVRDHDAIAVEDFRPKFLARTTMAHKAADAAIGATKQALIEMGRKHGRDVRLVHPAHTTMDCARCGARAKHALPLSERTYTCTACGAVSPRDKNSARVMLLRAGLDPAGVEGARPPGAPLREAA

SEQ ID NO: 3964 - protein, 408 aa, unidentified
MTTRWKALGDAGRARYTYRLRVSSAARTALLAEWDRCRWVWNECVAKSRAVHAHNRTHPGDRLTCGPAQLDRMLTGARATTPWLREGASVPQQQTIRDFAKARSKVLKDIDKRLPVRQRAGMPRHKRKREALPTLNYTTRGFRLKDGRLHLAGGIALTVVWSRELPAAPSSVRVYRDAVGHWYASFVVATEVQPLPATGRVLGVDWGVRETATTTSDTHDLPHAQHGKTAAQRLARYQRMTARRKPARGQAASKGYRQAQAQAAKLHKKVARQRQDTARKWAKRVVRDHDAIAVEDFRPKFLAKTTMARKAADAAIGATKTALIEMGRKHGRDIRLVHPAHTTMDCASCGARTKHALPLSERTYTCTACGAVSPRDKNSARVMLVRAGLIPAGVEGVRPPGALLPEAA

SEQ ID NO: 3965 - protein, 311 aa, unidentified
MIKTQVVKLKVNKTXQKHLDALCDYRRYCWNKGLETWQLMYEAHTLNKKDNPSPNERRVRDELVXNKADWQYDLSARCLQLAIKDLANAWKNFFDKAQPDWGIPSFKSKRCLQLAIKDLANAWKNFFDKAQPDWGIPSFKSKKAPRQGFKTDRAKIVNGKLRLDRPRSISKADWFDLKSYEALKMNEVKVISIFKEKGAYYAALPYEEEISSKAKNHQKTAVDVNVGHFNYTDGKINVLPAKLQKLYKRIKHYQRMLARKREVNGKLATKSNNYFAVRTKLQRDYRKVANIQNDLLQQFTTKLVDNYDQIV

SEQ ID NO: 3966 - protein, 368 aa, unidentified
MIRYKTEIKPNKKQIKEINKTINACKFVYNKFIEINKIRYDNGLKFLNHMKFSVWYNNEFIPNNKDKNWTKEVSTKATKQAMANAENSYVRFWNKTSGYPNFKKKQSNGSYYLIGKIKVERHRIKLPNLKWVKLKEKGYIPNKNIKSATVIKENDRYFISVLVDEEPKIIFKKPQTEGIGIDLGLKDTLFTPSGVKITDLRKNKKLIKLNKSLKRQQRKLSRKQKKSNNWFKQLIKVQRLYRKISNLKKDIKRKSILSIVKENPQYITIENLNIKGMMKNRKLSNAFQQVGLGYIVDWLKWKCYEYGIELRQVDRFYPSSQLCNQCGNRQKMPLNKRVYKCENCGTIEDRDINASINLKQAKEYTVLV

SEQ ID NO: 3967 - protein, 396 aa, unidentified
MLTAYKTEIQPTLNQQQKIDQTIGVARWVSNEYIAKNQEQYKKDQSFISGRTFSKWLNNEFIPNNPDYAWIKEVSSKSTKQAIMNTEKAFKSFFKGLSSYPKFKKKAQQKTKLYFVKNDAKHVIQSERHRIKVPTLGWVKLKEKGYIPTHDDQHMIKSGTISKQADRYYVSVLVEQSISTASLKQTPSAGIGVDLGLKDFAVFSDGMIYKNNNKSVRIKKLERKLKREQRVLSRKYEAEKTRITQKQLKKGESTRKNVCKQLLKVQKLHQTLADIRQDYQNKIVASLVRTKPAYITIEDLNIRGMMKNRHLSKAISKQGFYTFRTKLQTKATQHQIELRLVSRWYPSSKTCHTCKAIKKDLKLNDRVFLCPCGYSADRDLNAAYNLRDASIYEVIA

SEQ ID NO: 3968 - protein, 359 aa, unidentified
MNKKIHTKTLKVRVRDKHVKTLNAWAFAVNQVWNYCNELSHRAIKERQKWLSGYDLQDYTKGANKELGLNSATIQMIGHEYVTRRKQFKKAKLNWRKSRGAKRSLGWIPVRSDCISFKNGQIYHNRHYFKVWDSYSLSQYQFKSGSFNEDAQGRWYFNAVVEVKPEQSSGTASVGIDLGCKEAATDSNGHKVVGRQYRKLEQQLGIAQRANKKTRVKAIHAKICNRRKDDLHQYSRQLVDSNAAIFVGNVNSLGLTKTKLAKSVLDAGWGILKTMLEYKCAHAGVVFEVVNERYTTQICSCCGEIPASSPKGRAGLRIREWSCGSCGATHDRDVNAAKNILAAGHGRLAVGIPHYSQLV

SEQ ID NO: 3969 - protein, 408 aa, unidentified
MSTQRAVGGDAGNARYTYRLRVSSTARTALLAEWDRCRWVWNECVAKSRQVHAHNRAHPDNGLTCGPARLDKMLTEARAAMAWLREGSSVPQQQIVRDFGKSRARALKDIKDRLPMRRRAGMPRIKRKRDALPTLNYTRRGFRLKDRRLHLAGGIVLTVVWSRDLPSVPSSVRVYRDSLGHWYASFVVAAEAQPLPATGAVLGVDWGVKETATTTSDAHDLPHPQHGMNAARRLARYQRMMARRRPAKGQPASRGYREAQRQAAKVHKKVARQRQDTGRKWAKRVVRDHDTVAVEDFRPKFLARTSMARKAADAAIGATKTALIEMGRKHGRDIRLVHPAHTTMDCASCGARTKHALPLSERTYTCTACGLVSPRDKNSAHVMLVRAGLNPAGAEGVRPPGALLPEAA

SEQ ID NO: 3970 - protein, 361 aa, unidentified
MRIAFKFRLYPTKQQKEKIEFTLERCRLLYNRLLEERILAYKNEGRSLNYYDQAKTFTERKVYIPALKQVHSQVLQDAANRLDKAFQSFFRRVKSGETPGFPRFKPQKRYDSFTYPQAGYSIIGNKVRLSKIGDVKIKLHRQPQGKVKTCTITVKNGKYYVCFSCETPAQKLPVSDKRVGIDLGIKHLAITSDGQIFDSPEYLRKSENKLKQLQRNVSNKIRGSNRRKKSVLLLAKLHEKVANQRKDYAHKISRKLVNQYGYIAFEKLTKIKMLKNHNLAKSIADASWNQLVQFTTYKAESAGRVVVQVDPRNTSQECNNCGQIIKKSLSVRIHNCSHCGYVEDRDINAAKNILQRTLAVS

SEQ ID NO: 3971 - protein, 379 aa, unidentified
MLSYKFRIYPSKTIQAKLTEQLELCRWLYNRLLFELNKAKEEGRKIKQKDTQALIVKLKEENPNLNKVYSKVLQMVNYQLWSNIKALSELKKNGKKVGKLRYKGKGWFKTLNFNQSGFKIDFENNKLILSKAGTIPIKLHRPIEGRIKGVIVKREKSCKLYAIVQVEDEPELLPPTGKEVGIDVGVRHFLTDSEGRQIENPKFYERTLQRIKTLQRNLSRKQKGSKNREKSRIKLAKAYEKLVNQRNDFLHKLSRFYVNNHDIIAVEDLKIRNMVKVGNKLAQRILDASWGKFIEMLSFKAERAGRRVIKVNPRGTSEGLTFDDLYRDYISACRIKNKSGLGRSLEPVERRPLLLVTAKAVIEGQVFSVKQEAPCVSGE

SEQ ID NO: 3972 - protein, 407 aa, unidentified
MTSKGQAEDAGHARYSYRLRVSSTARTALEAEWARCRWIWNECCARSKKAYAEEEKCGPARLDKMLTEARTANACLRAGSSVPQQQIIRDFAMSRAEALKDIKARLPQQQRAGMPKCKKKHAADPSLNYTQRGFRLKDGRLHLAGGIVLSVVWSRDLPKPPSSVRVYRDSLGHWYASFVVAATIEALPATGRDIGIDWGVKETATTTSDAHDLPHAQHGKNAAQRLACYQRMMARRKPKRGQAGSKGYREAKRHTAKLHKKVARRREDTGRKWAKKVVRDHDRLAVEDFRPKFLAQSTMARKVTDAAIGATKRALIHMARKHGRELHLVHPAHTTMDCAQCGARTKHALPLSERTYACTACGAVSSRDKNSARVMLVRAGLNPAGADRVRADGPPARSQREPGIPIP

SEQ ID NO: 3973 - protein, 406 aa, unidentified
MTASHAAKDAGHARWTFRLRVSPTARTQLYAEWGRCRWVWNECVAKSKAVHARNKATGEKATCGPAQLDRMLTAARKATPWLREGSSVPQQQIIRDFGKSRAKAQKDIKDRLPQTRRAGMLKCKKKREALPSLNYTQRGFRLKDGRLYLASGIVLTVVWSRDLPASPSSVRIYQDSLGHWYASFVVPAQAEPLPETGAVIGIDWGVKETATTTSDAHDLPHPQHGQKAQAKLSRYDRMMARRRPKKGRPSSKGYREAKKLRAKAHKNVARQRQDTARKWAKKIVRDHDVIAVEDFRPKFLARTSMARKAADAAIGTTKAALLEMGRKHKRDVRLVHPAHTTMDCAQCGARTKHALPLSERTYTCTACAAVSSRDKNSARVMLVRAGLNPAGAEGARPPGALLQEAA

SEQ ID NO: 3974 - protein, 402 aa, unidentified
MGVGEGSRVRYTYRLRVSSTARVALEAEWARCRWVWNECVAKSKQVQERGRRTGVKETCGPAGLDRMLTEARRVMPWLREGSSVPQQQMIRDFGKARAKALKDIADRLPVNRRAGMPKLKKKRDTSLSLNYTTRGFQLREGRLHLAKGIALTVVWSRELPSRPSSVRVYRDSLGHWYASFVVATSAEVLPATGAVIGIDWGVAETATTTSDAHDLPHAEFGSRAAQRLARYQRQMARRKPKHGQPNSRGYKESQRQAAKAHKKVARQRQDTGRKWAKRVVTDHDVIAVEDFKPTFLTKTTMARKAADAAIGATKAALVAMARKHGRDLRLINPAHTTMDCAQCGTRAKHRLPLSERTYTCTACGASSPRDKNSARVMLVRAGLNPAGAEGVRPVGALLPQAA

SEQ ID NO: 3975 - protein, 432 aa, unidentified
MAEQIEEVPAELIQTRVYELHPNKTMRRVLDEACDYRRYCWNQGLALWNKMYKARQALKSSLASDSKKLTEEQKVLLKEKPSPSERRVRNMLVTDKKDWQYTQSARILQLAISDFGKAWNNFFDKAQPGWGKPKFRSKREARQGFKSDRSKIKDGILYLERAKESSVPKDQWRGFKLSEEPLSDEFGVVSYFKEKGRYYVAISYKIKAEDVKLPDKTGKATAVDVNVGHFDYTGGRVNVLPKKLDRIYKKIKHYQRQLAKKQVKNGEAACESENYLKTKAKLQACYRKASNIQNDLMHKFTTELVNDYDKIVIENLSVKGMLMSHVASKGVHRSMFGKFKQILTYKCDWYGKELILANKLYPSTQRCAACGNVKKGDDKITLYGNKKHGTKHNEYVCYNEKCPNYNKVVDRDKNAMLSLLALTEHPELNHAL

SEQ ID NO: 3976 - protein, 432 aa, unidentified
MAEQVKEAPAELIQTRVYELHPNKTMRKVLDEACDYRRYCWNQGLALWNEMYKARQTLKSSLSTDSKKLTEEQKVLLKDKPSPSERRVRNMLVADKKDWQYTQSARILQLAISDLGKAWNNFFDKAQPGWGKPKFRSKREARQGFKSDQSKIKDGILYLERAKESSVPKDQWRGFKLSEKPLSDEFGVVSYFKEKGRYYVAIPYKIKAEDIKLPDKTGKATAVDVNVGHFDYTGDRMNVLPKKLDKIYGKIKHYQRQLAKKQVKNGEAACESENYLKTKAKLQACYRKASNIQNDLMQKFTTELVNNYDKIVIENLSVKGMLMSHVASKGVHRSMFGKFKQFLTYKCDWYGKELILANKLYPSTQRCAACGNVKKGDDKITLYGNKKHGTKHNEYVCYNQKCPNYNKVVDRDKNAMLSLLALTEHPELNHAL

SEQ ID NO: 3977 - protein, 249 aa, unidentified
MIKTQVVKLKVNKTIQKHLDALCDYRRYCWNKGLETWQLMYEAHTLNKKDNPSPNERRVRDELVANKADWQYDLSARCLQLAIKDLANAWKNFFDKAQPDWGIPSFKSKKAPRQGFKTDRAKIVNGRLRLDRPRSISKADWFDLKSYEALKMNEVKVISIFKEKDSYYAALPYEEEISSKAKNHQKTAVDVNVGHFNYTDGKINVLPAKLQKLYKRIKHYQRMLARKREVNGKLATKSNNYFAVRTKLQ

SEQ ID NO: 3978 - protein, 251 aa, unidentified
MIKTQVVKLKVNKTMQKHLDALCDYRRYCWNKGLETWQLMYEAHTLNKKDNPSPNERRVRDELVANKADWQYDLSARCLQLAIKDLANAWKNFFDKAQPDWGIPSFKSKKAPRQGFKTDRAKIVNGKLRLDRPRSISKADWFDLKSYEALKMNEVKVISIFKEKDSYYAALPYEEEISSKAKNHQKTAVDVNVGHFNYTDGKINVLPAKLQKLYKRIKHYQRMLARKREVNGKLATKSNNYFAVRTKLQRD

SEQ ID NO: 3979 - protein, 360 aa, unidentified
MMEAKKNKIKDSLNKTKERRKSQSAVIIKAKIDSDKLNTSTLRILRRIFLEVKWLYNYIINKEFNNDIFNMDYKVNKVPVYVKDHYEIRDLKYLSSQIKEEIIDRTMDNIKGLSKLKENGYKTGKLKFKKYITSIPLKQYNNAYKIINNNSIKIQGIKQKLKVNGLYNLNILEPANALLINKNNDYYIYITAYKNKYILDKPINKQKIVLVDLGIKNQLTLSNGLIINYGIPKSKREKRIQKRLSKKVKNSNNYYKLKNRLNIEQTKNANKRKDTVNKIVHYLSSNYDIVITQDDNINSWKHLFGKRTESTNMGGIKEALKHKASTFILLDRFLPTTKECSKCHNKYNINLNDRIYKCPN

SEQ ID NO: 3980 - protein, 440 aa, unidentified
MIEARKNKIKDSLNKTKERRKSQSAAIIKAKIDSDRLNTNTSRILRRIFLEAKWLYNYIINKEFNNDIFNMDYKVNKVPVYVKDHYEIRDLKYLSSQIKEEIIDRTMDNIKGLSKLKENGYKTGKLKFKKYITSIPLKQYNNAYKIINNNSIKIQGIKQKLKVNGLYNLNILEPANALLINKNNNYYIYITAYKNKYIMEKPINNQKIVLVDLGIKNQLTLSNGLIINYGIPKSKREKRIQRRLSKKVKNSNNYYKLKNKLNIEQTKNANKRKDTVNKIVHYLSSNYDIVITQDDNINSWKHLFGKRTESTNMGGIKEALKHKASTFILLDRFLPTTKECSKCHNKYNINLNDRIYKCPNCGFIINRDYNSTLNDLYYGIIKINELLRNKYNKLKRYFNELNLNINVPVETFTSVPEGINISPYVRISVVDESGSLIALA

SEQ ID NO: 3981 - protein, 374 aa, unidentified
MSNPKVIRNYKFRIYPNKEQERIFFRWQETCRRIYNNALAQRKETWEREKQSISRTEQQVWLKENKKENGFFKEVHSQVAQEVLFRVDRAFDGFFRRVKNGETPGYPRFKGKGHYKSITYTQFGDGLGASFQNGKLKLSKIGLVKIELHREIPGTIKTVAIKKEAGGNWYAVFAVEIDKSQFEIHLGSATGLDVGLEKFASMSDGNTIENPRYLRKTEKRLKHAQRNLSRKQKGSRNRKKARYKVAKLHTKVRNQRKDFLHKESRKLVEIYSLIAVEDLNIKGMVRNHHLAKSISDAGWSEFLAMLCYKAEDAGSKIVKVNPCGTSQDCSNCGNTVPKELSIRIHQCPFCGLVLDRDINAARNILKKALALEAA

SEQ ID NO: 3982 - protein, 364 aa, unidentified
MRNYKFRIYPDQEQEQKLTKWLETCRVIYNSALADRKNHYYRNSKGLSRTRQQVILKADKEKHDQVKAIHSQVAQEVLFRVERAFNNFYRRVKTGEKPGYPRYKGPGQYKSLTYTQFGNGVGASFQDGMLKLSKIGMVKTIIHREIAGKIKTCTIKKEYSGKWYAVLAVEEYPVLYSPNCQAIGIDVGVKEFATLSNGETISNPKHLIKSEKKLKTLQRSVSRKKKGSTNRIKAKKKLARHHEKVRNQRKDFHHRVSSKLVWKYGKIAVEDLQIQNMVKNHNLAKSITDAGWGEFVSMLTYKAESAGREVTRVMPHGTSQQCSRCGNIVKKDLSVRTHSCPHCGLVLDRDHNAAINILYKAKAS

SEQ ID NO: 3983 - protein, 364 aa, unidentified
MRNYKFRIYPDKEQEQNLTKWLEACRVIYNSALADRKNHYYRNGKGLTRIKQQVILKADKEKHDQVKAIHSQVAQEVLFRVERAFNNFFRRVKAGVKPGYPRYKGPGQYKSITYTQYGEGLGASFQNGTLKLSKIGLVKIIVHREIYGEIKTCTIKKEQSGKWYAVLAVEEYPVLYSPNCQAIGIDVGIKEFATLSNGETISNPKHLVKSEKKLKTLQRSVFRKKKGSKNRIKAKKRLARHHEKVRNQRKDFHHRVSSQLAWKYGKIAVEDLQIQNMVKNHNLAKSITDAGWGEFVSMLSYKAESAGREVTKVIPHGTSQQCSRCGNIVKKDLSVRTHVCSYCGLVLDRDHNAAINILYKAKAS

SEQ ID NO: 3984 - protein, 369 aa, unidentified
MLRAYRTEINPSFEQRQTINQTIGTCRWMYNKFIETNQNFHKTGQSYMNGYAFSKWMNNVYLPNNPDKHWIKQSASKAVKQSIMNAHRAYQTFFKNKKGYPKFKKKSGIGSYYLIGTIHVQRHRIQLPKLGWIKLKEKSYIPTNNIKSATIVKEYDRYYVSVLVDQLPSPILKPKQTDGIGIDLGLKEAVFTPSGVKIRSFKTNQTIVKLDKSLKRQQRKLSRKKKGSHNWYKQLLKLQRIYRRIKNIKRNIKHKGILSIVRTNPQFITVENLNIKGMMRNKRLANSFQQIGLGYIVEWLKIKCQDYGIELRQVDRFYLSSQICSDCGYIQPMPLNQRTYHCHHCGMIKDRDINASINLKQATDYTVIV

SEQ ID NO: 3985 - protein, 393 aa, unidentified
MQTTYKFRLYPTGEQEQKLLWTLNKCRYVYNFLLSEMNQQKVIDKAQLQEMIVDLKRIEPDLKNVHSKVLQYENYRLFSNLRALSQTKKMGRKVGSMRFKGKNWFKTFSYNQSGFAVMQNRTRYDKLWLSKIGEIPFIMHRDIEGKIKQITIKHHPSGKWYASIIAETKTEIPETKNKEKVGLDLGTMNYVYDSDGNHSDNPKHLDKSLGKLQKGQRRLSRKRKGSQNRNKQRISVARVHEKIINQRDDFLHKLSRYYVDKYGFIAVEDLQIKNMVRNCHLAKSISDASWSKFIQMLEFKAERAGVRVVKVEPRGTTQICSSCGIKVHKELWNRTHKCTCGLEINRDYNSAMNILKRALGQELSKSTPVEIEPLLSNEQVWSEKQETPCESYG

SEQ ID NO: 3986 - protein, 369 aa, unidentified
MLRAFRTEINPSFEQRLTINQTIGTCRWIYNKFIEINQYLYKKEKSYMDGYTFSKWINNEYLPSNPDKHWIKQSASKAVKQSIMNAHRAYQTFFKKQKGYPKFKKKSGIGSYYLIGTIHVQRHRIRLPKLGWIKLKEKGYIPTNNIRSATVIREFDRYYVSVLIDCEQPLRFKPKQTDGIGIDLGLKEAVFTPSGVKIRNFKTNQSIVKLDKSLKRHQRKLSRKKKGSHNWYKQLLKVQRLYRRIKNIKRNIKRKGILSIVRTNPQFITIENLNIKGMMRNKRLANSFQQIGLGNIVECFKIKCQDYGIELRQVDRFYPSSQICSDCGHRQPMPLNQRTYHCHHCGMIKDRDINASINLKQATDYTVIV

SEQ ID NO: 3987 - protein, 462 aa, unidentified
MRKRAMMSEERRNKIKNSLKLTKEKRKTQDVIILKLKIDNDKLNNNTIKALNTMFLETKWLYNYILDKEFNNDIFKFDYKTNYANVYVKDHYERRKINYLSAQMKQDLLKRTENNISGLHELKENGFKTGKLKFKKEINSIPLRQFGKGKTYNIINNFNYIKIQRIEQPLKVNGFYETFTDNENIKHKELKYDFNNLDFGNAMLIHKNNNYYINITAYTKKEERNNNRIIGIDSGIKTQLTLSNGLKLEYNIPKSKREIRLQRELSRKAKYAEGSKKKLSGEQSKNYNKNKNRLNREQQKRNNKKRDVKNKIVHYITSNYNIIITQNDNISGWQKLFGKKIENTGIGSIIEALKSKASNLIPVGRFIPTTKECNNCHNKYDIKLNERIYKCSNCGYIIDRDYNSSLNMIYYGMKTKKFKNTVPEDSREFTPGETLTDTFEGLNTPYVKASYVDEPGSFNALA

SEQ ID NO: 3988 - protein, 413 aa, unidentified
MYYAYRFRLNPTPEQREQLDYHRDTCRQLYNHALNKFEQIPDSAGTLNQRVRQVRDQLTDLKEWWEELNDLYSTVAQAAVMRIEDSIKALSELKERGYNVGSLNWKAPQDFRSFTYVQSGFEFDSKNGQPVLSLSKLADIPIVNHRVIPDDVTIKEVTIKKEPTGEWFASFAVDGKQTPEKPTGPERCVGIDVGILKYAHDTDGTAVGSLDLSDEREQLERAQRDLSRKEHGSNNWEKQRKVVAQRHADLKRKRRDFLHKLSNYYATEYDLVAVESLDAKGLVELPGNSRNRASAAWGTFKRMLEYKCDREGTHFVEVDPKDTTQECASCGVKTEKPLWVREHSCPSCGFEADRDANAAWNILSRGLEEVGVVHSESTPVETALPADTSVSAKRVVEAGSPTLKERTASAVSE

SEQ ID NO: 3989 - protein, 419 aa, unidentified
MNYNYRYRLTPTVDQRETLDYHRDTCRQLYNHALYRFNQIPEDEGTVKQRVRTIRDELPDLKDWWDALTDVYSKVLQPTIMRVAKNINALGKLKEQGYKVGELRWKSPREFRSFTYNQSGFELDKKGGQTVLSLSKLADIPIEFHRPLPDDATVKEVTLKKEKTGEWFAIFGIERDTEPPAKPSLEEIDAEEVVGIDVGIRKYAHDTDGTAVESLDLSEDRDRLEREQRTLSRKEYESTNWENQRQRVAECHLDIKRKRRDFLHKLSNYYAREYDLVAVEDLDVKRMLESPRNSRNTASAAWNTFTDMLEYKCEREGTHFVEVDPDGTTKECAQCSVETEKPLWVREHSCPACGFEDDRDANAAWNILSRGLTKLGVGHSKGTPVETALPAGTSPVPAKRVVEAGSPTLSERVSASRVG

SEQ ID NO: 3990 - protein, 432 aa, unidentified
MYYAYKYRLKPSDAHREELDRHRDICRQLYNHTLYRLNEYQDEHGELPSMTILRSELPDLKKWWDGLSDVYSKVLQTVVERLFDNLKGLSALKENGYGVGQLKWKPPREFRSFTYSQSGFKLDKKGGQTVLSLSKLADIPIRLHRAIPDDATLKQVTVKKEPTGEWFATFGVQMDREPPKPPEKPEQCVGIDVGILKYAHDTDGTAVGSLDLSDERDRLEREQRKLSRKQHGSNNYEKQRRRVAECHADLRRKRHDFLHKLSNYYAREYDFVAVEDLNVKGMMESPSNSRNTASAAWRTFISLLKYKCKREGTHFVAVNPRGTTKECASCGVSTDKPLWVREHSCPACGFEADRDANAAWNILSRGLEDVGVGYSESTSPEIFNFWCADESCSDSSTPVETALPVDIPVSAKRVVQAGSPTLKERTAQAVSE

SEQ ID NO: 3991 - protein, 411 aa, unidentified
MYYAYKYRLEPSDTHREELDRHRDICRQLYNHALYRFNQIPEDAGTLNQRVRSIRDELPSLKDWWGGLSDVYSTVLQTAVMRIEQNIKGLSKLKENGYGVGRLKWKPPRAFRSFTYSQSGFKLDKKGGQTVLSLSKLADIPIRLHRAIPDDATVKQVTLKKEPTGEWFATFGVEFDRAPPEPPTGPEKVVGIDVGILKYAHDTDGAAVESLDLTDERERLEREQRALSRKEHGSANYDRQRRRVAECHADLKRKRRDFLHKLSNYYAREYDLVAVEDLNVRGMLESPSNSRNTASAAWRTFLSMLEYKCEREGTHYVPVEPAGTTKECAACGVSSDKPLWVREHACPSCGFTADRDANAAWNILSRGLERIGVGHPESTPVETALPVDTAVSAKRVIEAGSSALNERVSAK

SEQ ID NO: 3992 - protein, 420 aa, unidentified
MNYNYRYRLKPTERQRETLDYHRDTCRQLYNHALYRFNQIPEHEGTVKQRVRKIRDELPDLKDWWDALTDVYSKVLQPTVMRIAKNITALGKLKEQGYTVGELRWKSPREFRSFTYNQSGFELDKKGGQTVLSLSKLADIPIEHHRSLPDDATVKEVTLKQEKTGEWFAIFGIEMDTDPPAKPPLEDVGTDEMVGIDVGILKYAHDTDGTAVESLDLSEERDRLEREQRNLSRKEYESNNWENQRRRVAACHQKIKRKRRDFLHKLSNYYAREYELVAVEDLEVKGMLESPRNSRNTASAAWNTFSDMLETKCEREGTYFAEVGPEGTTKECAQCGVETDKPLWVREHSCPACGFKADRDANAAWNILSRGLTKLGVGYSEGTPVETALPADTAVVSAKHVVETGSPCLKEPPKAVSRQG

SEQ ID NO: 3993 - protein, 408 aa, unidentified
MATRQKTSEDAGHARYTYRLRVSSTARTALLAEWDRCRWIWNECVAKSRAAHAHNRASPGDKLTCGPAQLDKMLTEARARTPWLREGASVPQQQIIRDFAKSRSKALKDIDKRLPMRQRAGMPRPKKKREALPTLNYTQRGFRLKDGRLHLAGGIELTVVWSRELPAAPSSVRVYRDVAGHWYASFVVATEVQPLPATGAVLGVDWGVKETATTTSDAHDLPHPQHGRKAQAKLTRYDRMVARRKPKTGQASSKGHREAKKWRAKTYAKIARQRQDTARKWAKKVVRDHDTIAVEDFRPKFLAKSTMARKAADAAIGATKTALIEMGRKHGRDVRLVHPAHTSMDCASCGARTKHALPLSERTYTCTACGVVSPRDKNSARVMLVRAGLNPAGVEGLRPPGALIPEAA

SEQ ID NO: 3994 - protein, 378 aa, unidentified
MSKGTSSPKAMRNYRFRIYPSREQEQKLLDWIETCRKIFNTAIAQRKESWEKEKRSLSRREQQVWLKEAKKENEYFRQVHSQVAQEVLFRVERAFAAFFRRVKNGETPGYPRFKGRGRYKSLTFTQFGEGKGASFQDGKLKLSKIGLVKIKLHRQIPSTVKTVIIKRDAVGRWWAVFAVEIELSQQQTHAGPAIGLDAGLEKFAALSDDSVIENPRHLRKTEERLKRAQRELSRKEKGSRNRERARRKLAKLHAKVRSQRMDFLHKQSRKLVNTYSLIAVEELNIKGMVKNHHLAKSISDAGWGEFISMLEYKAGEAGTKLVKVNPSGTSQECSRCGMTVPKELSERVHCCPYCGLTLDRDVNAARNILKRALALEAA

SEQ ID NO: 3995 - protein, 401 aa, unidentified
MINRGFRYRLDPTDEQELMFRKFAGVCRTVYNAALYQREAFWKQHLRTEGKHVSYAGQCLELTDLRAEFDWIREVSATCEQQALRDLDKAFQRFFDGISGYPTPRRKGENDSFRFQGRDIEVEKLNRNWSRVWLPKIGWVRFRDTRPMIGKLKNVTVSLDPLGWHVSFAREIEHEAPANIAPAVGIDRGVANSIAMSSPLEGEQFFSVGKERLAVLDRRRRKHQRDLSRRRRGSKRCGNARKRIAAVAAKGARVREHFNHVQTTRIVRRFGTVCIEDLNIASMTASAKGTVEEPGKNVAQKAGLNRSILEQGWGQFEEFLTYKLAASGGVLVKVDPRNTSRKCSNCGHIDARNRESQASFRCVECGHEAHADVNAAINILQAGTRPSVRAPARRRESRKAA

SEQ ID NO: 3996 - protein, 397 aa, unidentified
MIKRGFRYRLDPTDEQELMFRKFAGVCRAVYNAALHQREVFWRQHLRTEGRHVSYVGQAAELTALRAEFDWIREVSQACEQQALRDLDNAFQRFFDGVSGYPTPRRKGKNDGFRFQGRNVEVEKLNRNWSRVKLPKIGWVRFRDTRPMVGKLKNVTVSLDSLGWHVSFAREIEHEAPANIAPAVGIDRGVANSIAMSTGEMDSIGKERLAVLDRRRRKHQRDLSRRKRGSQRYGKTRKRVAAVAAKGARVREHFNHVRTTRIVRNFGTVCIEDLNIANMTASAKGTVEEPGKNVAQKAGLNRSILEQGWGQFEEFLTYKLAASGGVLVKVDPRNTSRKCSNCGHIDARNRESQASFRCVECGHEAHADVNAAINILQAGTRPSEEAKAPRRKSRKAA

SEQ ID NO: 3997 - protein, 374 aa, unidentified
MSNNMSSPKEIRNYKFRIYPNKEQESKLTNWLTTCRIIYNSALADRKNYYERTGNGLTRIAQQETLKADKAKHPKVKEVHSQVAQEVLFRVERAYNNFFRRVQAGEKPGYPRYKGPGQYKSLTFTQFGDGLGASFQNDKLKLSKIGLVKIDLHREIHGQVKICTIKREQSGKWYAVLAVEEYPVLFSPNWQTIGLDVGIKEFAVLSNGEKIANPKHLQKSERKLKTLQRSLSRKKKGSKNRAKARNKLARQHEKIRHQRKDFHHKISDQLVWRYGKIVVEDLQITNMVQNHKLAKSISDAGWGEFISMLTYKAESAGRMVEKIPPYGTTQQCSRCGSIVKKDLSVRIHACPHCGLVLDRDHNAAINILHKSKAS

SEQ ID NO: 3998 - protein, 369 aa, unidentified
MLRAYRTEINPSFEQRQTINQTIGTCRWMYNKFIETNQNFHKTGQSYMNGYAFSKWMNNVYLPNNPDKHWIKQSASKAVKQSIMNEHRAYQTFFKNKKGYPKFKKKSGIGSYYLIGTIHVQRHRIQLPKLGWIKLKEKSYIPTNNIKSATIVKEYDRYYVSVLVDQLPSPIFKPKQTDGIGIDLGLKEAVFTPSGVKIRSFKTNQTIVKLDKSLKRQQRKLSRKKKGSHNWYKQLLKLQRIYRRIKNIKRNIKHKGILSIVRTNPQFITVENLNIKGMMRNKRLANSFQQIGLGYIVEWLKIKCQDYGIELRQVDRFYPSSQICSDCGYIQPMPLNQRTYHCHHCGMIKDRDINASINLKQATDYTVIV

SEQ ID NO: 3999 - protein, 360 aa, unidentified
MRKTYKYRLYPTKEQEAKIQFTLERCRLLYNRLLDERRVAYNTDKTTLNYYNQANTLTERKKYIPALKQVHSQVLQDVVKRLDKAFQAFFRRVKTGEKPGYPRFKSVSRYNSFTYPQGGYSINGNRLVLSKIGEVKIKLHRQPQGKIKMCTVVVKNGKYYACLSCEVEPNILPESHKTVGIDLGVKHLAITSDGEFYEHPRFLRESERKLRKKQRSVSRKKKGSSRRRKAIRELAKVHEHIANQRRDYAHKVSRRLVNGYGLMAFENLNVQGMVKNHHLAKSIVDASWNQLVQYTTYKAEEAGRRVVLVDPKNTSQLCSNCGEIVPKKLSDRVHRCEHCGYVQDRDINAAQNILKRALVV

SEQ ID NO: 4000 - protein, 429 aa, unidentified
MNMNKNETIKATLKATRAKRKNQTCKVYEIKLDKSHLNNATKTHLNRLFIEAKWFYNHILAQHKIFGMDDNVHQVPVKVKDIFEIRDLQCLSAQMRQSILSRTQDNIRGLAERKKKGYKIGKLKYKSLIQSIPLKQYGNTYKILNTKYIRVQGIKQKLKVIGLKQIPVDSDIANGTLIHKNGDYYLSITTYQEKGKTKQVHANKSVGIDFGLNRQLMLSRTGIAIQYSIPISPKLRRIARTLSKQKLHSKNWNKTRIKLNKEYDKTTNIKEDIKNKVVSFLKNNYETVCVQDESLKAWQRIWGRKILSTSIGGIISTLKKKVHTLIEVPKNFPSTKTCSKCGNIQEIALDERVYICKNKNCNNILDRDHNSADNMENEGLKQVGTVRTELTPVEIEANTSMFLRYLNNIPYIRASSVYESGSSRLLAGE

SEQ ID NO: 4001 - protein, 360 aa, unidentified
MRRAYKYRLYPTRDQKKKIEFILERCRLLYNRLLEERLLAYKQNGKSLSYLDQQNSLVDRKNHIPILKHVYSQVLQDVAKRLDKAYQAFYRRVKQGERAGFPRFKQKQRYDSFTYPQGGYTIQGNKLKLSKIGEIKFKLHRPVEGSIKTCTIIVKNGCYYACFSCEVEAVLLEPTGRQVGIDLGIKHLAIPSEGKPFESPTYLRKSERKLKQLQRAVSRKKKGSNRRKKAVLLLAKQHEKVANKRKDHAHKISNSLVQSYDLIAFEKLHIQGMIKNQHLAKSISDAGWHQLVQFTSYKAESAGRAVVQVDPRYTSQLCSNCGNLVKKTLAERIHRCPCGTTLDRDINAAKNILQRALQVS

SEQ ID NO: 4002 - protein, 386 aa, unidentified
MTIKTQVVKLKVNKTMQKQLDALCDYRRYCWNKGLETWQLMYEAHTLNKKDNPSPNERRVRDELVANKADWQYDLSARCLQLAIKDLANAWKNFFDKSQPDWGIPSFKSKKAPRQGFKTDRAKIVNGRLRLDRPRSISKDSWHDLSSYEVLKMSEVKVVSIFKEKGAYYAALPYEEEISSKAKTYQKTAVDVNVGHFDYTDGKINVLPAKLQKLYKRIKHYQRMLARKREVNGKLATKSNNYFAVRTKLQRDYRKVANIQNDLLQQFTTKLVDNYDQIVIEDLAVKQMMMTHVASKGMQRSLFSRFRQILTYKCNWYGKELILADKTYPSTQRCAACGYVKKGDEKITLQGNKKHGTKHNEYICYECGYKNDRDENAVLNLLALAK

SEQ ID NO: 4003 - protein, 436 aa, unidentified
MAEQVKEAPAELIQTRVYELRPNKTMRKVLDEACDYRRYCWNQGLALWNEMYKARQTLKSSLSTDSKKLTEEQKVLLKDKPSPSERRVRNMLVADKKDWQYTQSARILQLAISDLGKAWNNFFDKAQPGWGKPKFRSKREARQGFKSDQSKIKDGILYLERAKESSVPKDQWRGFKLSEKPLSDEFGVVSYFKEKGRYYVAIPYKIKAEDIKLPDKTGKATAVDVNVGHFDYTGGRMNVLPKKLDKIYGKIKHYQRQLAKKQVKNGEAACESENYLKTKAKLQACYRKASNIQNDLMQKFTTELVNNYDKIVIENLSVKGMLMSHVASKGVHRSMFGKFKQFLTYKCDWYGKELILANKLXXXXXXXXXXXXXXXXXXXXXXXXXXXXXXXXXXXXXXXXXXXXXXXXXXXXXXXXXXXXXXXXXXXPLRKQEAWY

SEQ ID NO: 4004 - protein, 360 aa, unidentified
MAEQVKEAPAELIQTRVYELRPNKTMRKVLDEACDYRRYCWNQGLALWNEMYKARQTLKSSLSTDSKKLTEEQKVLLKDKPSPSERRVRNMLVADKKDWQYTQSARILQLAISDLGKAWNNFFDKAQPGWGKPKFRSKREARQGFKSDQSKIKDGILYLERAKESSVPKDQWRGFKLSEKPLSDEFGVVSYFKEKGRYYVAIPYKIKAEDIKLPDKTGKATAVDVNVGHFDYTGGRMNVLPKKLDKIYGKIKHYQRQLAKKQVKNGEAACESENYLKTKAKLQACYRKASNIQNDLMQKFTTELVNNYDKIVIENLSVKGMLMSHVASKGVHRSMFGKFKQFLTYKCDWYGKELILANKL

SEQ ID NO: 4005 - protein, 274 aa, unidentified
MIKTQVVKLKVNKTMQKHLDALCDYRRYCWNKGLETWQLMYEAHTLNKKDNPSPNERRVRDELVANKADWQYDLSARCLQLAIKDLANAWKNFFDKAQPDWGIPSFKSKKAPRQGFKTDRAKIVNGKLRLDRPRSISKADWFDLKSYEALKMNEVKVISIFKEKGAYYAALPYEEEISSKAKNHQKTAVDVNVGHFNYTDGKINVLPAKLQKLYKRIKHYQRMLARKREVNGKLATKSNNYFAVRTKLQRDYRKVANIQNDLLQQFTTKLVDNY

SEQ ID NO: 4006 - protein, 407 aa, unidentified
MATPAMRREDAGHARYTYRLRVSSTARAALLAEWARCRWVWNECVAVSRKVHTANQGTAEKTTCGPAQLDKMLTEARDTMAWLRQGASVPQQQAIRDFAKARAKAMKDIKAKLPVRQRAGMPRIKRKRDALPTLNYTRRGFRLKDGRLHLAGGIALTVVWSRDLPAAPSSVRVYQDCVGHWYASFVVATQAQPLPATGRVLGVDWGVKETATTTSDAHDLPHAQHGKNAARKLARYQRMMARRKPARGQAASRGYRQAQRQTAKVYKKVARQRQDTARKWAKAVVRDHDAIAVEDFRPKFLAKTTMARKAADAAIGATKTALIEMGRKHGRDVRLVHPAHTTMDCASCGARTKHALPLSERTYACTACAAVSPRDKNSARVMLVRAGLNPAGAEGARPPGALLPEAA

SEQ ID NO: 4007 - protein, 389 aa, unidentified
MLKSYKTEIILNEQQKKIFKQTIGVCRFAYNFFIAHNQEKYKKSNKFISGMDFSKWLNNDFIPNNPEYSWIKDVYAKAVKQSIMNADKAFRKFFKGESRFPRFKKKKNQDVKMYFVKNDAKTVIPCERHRIKIPTLGWVKIKEKGYLPTNATIKSGTVSQKTDRYYVSVLVEEDAASESTDSNDGIGVDLGLKEFAVISSQDRPVKNINKTARVRKIEKSLKRQQRKLSRKYESAKKNKNKKEETATRQNIHKQVLKVQKLHYRLSNIRENHINQTINMIIKQKPRFITIEDLNVRGMMKNRHLAKAVAQQCFNQFKTKLEVKCKINGIELRIVDRFYPSSKLCSCCGHRKVDLKLSDRIYVCDNCGNTMDRDMNAAVNLKNAKIYKVA

SEQ ID NO: 4008 - protein, 432 aa, unidentified
MAEQIEEVPAELIQTRVYELHPNKTMRRVLDEACDYRRYCWNQGLALWNEMYKARQALKSSLASDSKKLTEEQKVLLKEKPSPSERRVRNMLVTDKKDWQYTQSARILQLAISDLGKAWNNFFDKAQPGWGKPKFRSKREARQGFKSDQSKIKDGILYLERAKESSVPKDQWHGFKLSEKPLSDEFGTVSYFKEKGRYYVAIPYKIKAEDIKLPDKTGKATAVDVNVGHFDYTGGRMNVLPKKLDKIYGKIKHYQRQLAKKQVKNGEAACESENYLKTKAKLQACYRKASNIQNDLMQKFTTELVNNYDKIVIENLSVKGMLMSHVASKGVHRSMFGKFKQFLTYKCDWYGKELILANKLYPSTQRCAACGNVKKGDDKITLYGNKKHGTKHNEYVCYNQKCPNYNKVVDRDKNAMLSLLALTEHPELNHAL

SEQ ID NO: 4009 - protein, 305 aa, unidentified
MAEQVKKAPAELIQTRVYELCPNKTMRKVLDEACDYRRYCWNQGLDLWNEMYKERQALKSSLASDFKKLTEEQKVLLKAKPSPSERRVRNMLVADKKDWQYTQSARILQLAISDLGKAWNNFFDKAQPGWGKPKFRSKREARQGFKSDQSKIKDGILYLERAKESSVPKDQWRGFKLSEKPLSDEFGTVSYFKEKGRYYVAIPYKIKAEDVKLPDKTGKATAVDVNVGHFDYTGGRVNVLPKKLDRIYKKIKPLSKEACQKASRKWRSCLQNRELLEDESQASSMLSQGKQYPKRLDSQVYDRTG

SEQ ID NO: 4010 - protein, 432 aa, unidentified
MAEQVKEAPAELIQTRVYELRPNKTMRKVLDEACDYRRYCWNQGLALWNEMYKARQTLKSSLSTDSKKLTEEQKVLLKDKPSPSERRVRNMLVADKKDWQYTQSARILQLAIFDLGKAWNNFFDKAQPGWGKPKFRSKREARQGFKSDQSKIKDGILYLERAKESSVPKDQWRGFKLSEKPLSDEFGVVSYFKEKGRYYVAIPYKIKAEDIKLPDKTGKATAVDVNVGHFDYTGGRMNVLPKKLDKIYGKIKHYQRQLAKKQVKNGEAACESENYLKTKAKLQACYRKASNIQNDLMQKFTTELVNNYDKIVIENLSVKGMLMSHVASKGVHRSMFGKFKQFLTYKCDWYGKELILANKLYPSTQRCAACGNVKKGDDKITLYGNKKHGTKHNEYVCYNQKCPNYNKVVDRDKNAMLSLLALTEHPELNHAL

SEQ ID NO: 4011 - protein, 434 aa, unidentified
MYYAYKYRLKPSDTHREELDRHRDICRQLYNHALYRFDQIPVDAGTLNQRVRSIRDEIPSLKDWWTDLSDVYSTVLQTTVMRIEQNVKGLSKLKDNGYGVGQLTWKPPREFRSFTYSQSGFKLDKKGGQTVLSLSKLADIPIRLHRAIPDVHKSDSSCAAHQKSLISEDDATLKQVTVKKEPTGEWFATFGVEMDREPPAKPKNPEKCVGIDVGILTYAHDTDGTAVGSLDLTDERDRLEREQRKLSRKQHGSNNYETQQRRVAECHAALRRKRRDFLHKLSAYYAREYDLVAVEDLNVKGMMESPSNSRNTASAAWRTFLSLLEYKCEREGTHFVAVNPRGTTKECASCGVSTEKPLWVREHSCPACGFEADRDANAAWNILSRGLEDVGVGHSEQTPVETALPADTNSVSAKRVVEAGSPTLKERTASAVSE

SEQ ID NO: 4012 - protein, 374 aa, unidentified
MSSLKVMRNYRFRLYPNKEQEQKLLDWLEACRWIYNEALAQRKNAWEQERRSVTRTEQQVWLREAKKANKRLREVHSQAAQEVLFRVERAFAGFFRRVKNGDTPGYPRFKGKGRYKSLTFTQFGKGLGACLADGKLRLSKIGLVRIKLHRVIPGKVKTVTIKRDATGKWWAIFATEVEISAPLVRPGPAVGVDVGLEKFATLSNGENIENPRHLIKTERKLKCVQRSLFRKQKSSRNREKARRKLAKLHAKVRNQRRDFLHKVSRGLVNVYGFIAVENLNVRGMVRSHCLAKSIHDVSWSEFLAMLEYKAAEAGTKLVKVNPSGTSQECSNCGKTVPKDLFVRLHECPHCGLVLDRDVNAARNILKRALALEAA

SEQ ID NO: 4013 - protein, 402 aa, unidentified
MGVGEGSRVRYTYRLRVSSTARVALEAEWARCRWVWNECVAKSKQVQERGRRTGVKETCGPAGLDRMLTEARRVMPWLREGSSVPQQQMIRDFGKARAKALKDIADRLPVNRRAGMPKLKKKRDTSLSLNYTTRGFQLREGRLHLAKGIALTVVWSRELPSRPSSVRVYRDSLGHWYASFVVATSAEVLPATGAVIGIDWGVAETATTTSDAHDLPHAEFGSRAAQRLARYQRQMARRKPKHGQPSSRGYKESQRQAAKAHKKVARQRQDTGRKWAKRVVTDHDVIAVEDFKPTFLTKTTMARKAADAAIGATKAALVAMARKHGRDLRLINPAHTTMDCAQCGTRAKHRLPLSERTYTCTACGASSPRDRNSARVMLVRAGLNPAGAEGVRPVGALLPQAA

SEQ ID NO: 4014 - protein, 400 aa, unidentified
MAAVRESDGAGHARYTYRLRVSATAREALLAEWGRCRWVWNECVARSKKAHTDAEECGPARLDRLLTRARAITPWLAAGASVPQQQLIRDFGKSRAKALKDIKDRLPARQRAGMPGYKKKHEADPSLNYTRHGFRLKDGRLHLAGGITLTVVWSRELPAEPSSVRVYRDSVGDWYASFVVPARVEPLPESGRALGVDWGVKEIATTTSDAHDLPHAEHGKKAKGKLSRYDRMMARRKPKKGQAASKGYRQAKKWRAKTYQKIARQRQDAARKWAKKVVRDHDAIAVEDFRPKFLAKTSMARKAADAAIGATKKALIEMGRKHGRDVRLVHPAHTTMDCGRCGARTKHALPLSERTYTCTACGMVSPRDKNSARVMLVRAGLAPAGVEGVRPPGALLQEAA

SEQ ID NO: 4015 - protein, 400 aa, unidentified
MTTPGEANGAGHARYTYRLRVSSSACTALLAEWDRCRWIWNECVARSKKAHQDGEKCGPAMLDKMLTEARAITPWLAEGSSVPQQQLIRDFGKSRAKALKDIKDRLPMRQRAGMPRHKKKREADPTLNYTRRGFRLKDDRLQLAGNIVLTVVWSRKLPAEPSSVRVYRDSVGHWYVSFVVPAAVEPLPETGAVLGVDWGVRETATTTSDAHDLPHSEHGRKTEKKLTRYDRMTARRKPKKGQASSKGYRGAKRLRAKTYQKIARKRQDTARKWAKKVVRDHDAIAVEDFRPKFLAKTNMARKAADAAIGATKKALLEMGRKHGRDVRLAHPAHTTMDCVRCGARAKHALPLSERTYTCTACGTVSPRDKNSACVMLVRAGLYPAGVEGVRPPGALLQEAA

SEQ ID NO: 4016 - protein, 382 aa, unidentified
MKYTYKFRLYPTQEQEVKLGETLELCRRTYNRFLSQINETDEIPKRTNLQFQLPEMKKRDSDLKQVYSKVLQMVLYQLYSNLRSLSKLKKNGRKIGRLRYKDKGWFKTFTYNQSGFKIIKTNNRLDKLHLSKIGDIPIRVHREIEGKIKQITIKRTNSGKWFACICVEKRPQQEKSIKSAIGIDVGITYFATDSDGRQIENPHNLEKSLGRLRKEQQKLSRKRKGSENYEKQRKKVAKLHEKIKNQRDDFLHKLSRHYVDNYDLIAVEDLNVKEMIGNNHLSRYISDASWSKFVRYLSYKAESAGKMVVKVDPKGTSQEHKHGELDRDYNASLNILERGMKEIGMGRAESTLVETEPLLHLSSQDVITGQVQSSKQEAHAKA

SEQ ID NO: 4017 - protein, 415 aa, unidentified
MNSQLSYLPVRLVIVAAEARTGEGTGYARWTYRLRVSAGARAALEAEWGRCRWVWNECVARSKKAHQDGEKCGPAMLDKMLTEARRITPWLREGSSVPQQQVIRDFGTSRTKSLKDITDRLPVRRRAGLPRWKRKRDAAPTLNYTRRGFRLKDGRLHLAGGIVVTVVWSRELPADPSSVRVYQDGLGHWYASFVVPAQVEPLPGTGLVLGVDWGVRETATTTSDAHDLPHAGHGRKAMAKLGRYQRMMARRSTAKDKAQSNGYRIAKRQAAKVHRKIARQRQDAARKWAKKVVRDHDAVAVEDFRPKFLARTSMARKAADAAIGATKAALIEMGRKHQRDIRLVHPAHTTMDCARCGARTKHALPLSERTYTCTACGGASPRDKNSAHVMLVRAGLNPAGVEGVRPPGPPVRKAA

SEQ ID NO: 4018 - protein, 276 aa, unidentified
MIKTQVVKLKVNKTMQKHLDALCDYRRYCWNKGLETWQLMYEAHTLNKKDNPSPNERRVRDELVTNKADWQYDLSARCLQLAIKDLANAWKNFFDKAQPDWGIPSFKSKKSPRQGFKTDRAKIVNGKLRLDRPRSISKDSWHDLSSYEVLKMSEVKVVSIFKEKGAYYAALTYEEEPISKTKTHQKTAVDVNVGHFNYTDGKINVLPAKLQKLYKRIKHYQRMLARKREVNGKLATKSNNYYAVRIKLQRDYRKVANIQNDLLQQFTTKLVDNYDQ

SEQ ID NO: 4019 - protein, 280 aa, unidentified
MIKTQVVKLKVNKTMQKHLDALCDYRRYCWNKGLETWQLMYEAHTLNKKDNPSPNERRVRDELVANKADWQYDLSARCLQLAVKDLANAWKNFFDKSQSDWGIPSFKSKKAPRQGFKTDRAKIVNGKLRLDRPRSISKADWFDLKSYEALKMNEVKVISIFKEKGAYYAALPYEEEISSKAKTYQKTAVDVNVGHFNYTDGKINVLPAKLQKLYKRIKHYQRMLARKREVNGKLATKSNNYFAVRTKLQRDYRKVANIQNDLLQQFTTKLVDNYDQIVIE

SEQ ID NO: 4020 - protein, 408 aa, unidentified
MATLRRSLGDAGHARYTYRLRVSSTARTALRAEWDRCRWVWNECVAKSRQVHVHNRQHPENKQTCGPAQLDKMLTEARTKTPWLREGASVPQQQTIRDFAKARSKALKDIEKRLPVWQRAGMPRPKKKREALPTLNYTTRGCRLKDGRLHLAGGIVVTVVWSRDLPSAPSSVRVYRDSLGHWYASFVVAAETRPLPVTGRVIGVDWGVKETATTTSDDHDLPHVQHGKIAAQRLARYQRMMGRRKPARGQAASRGYREAQRQAAKMHKKVARQRQDTARKWAKKVVRDHDTIAVEDFRPKFLAKTTMARKATDAAISATKTTLIEIGRKHGRDIRLVHPAHTTMDCASCGARTKHALPLSERTYTCTACGAISPRDKNSAHVMLVRAGLIPAGVEGVRPPGALLQEAA

SEQ ID NO: 4021 - protein, 359 aa, unidentified
MRKAYKYRLYPTKEQEEKIQFTLERCRLLYNRMLEERRFAYETEKATLNYYDQANTLNERKKYIPSLKQVHSQVLQDVIKRLDKAFQAFFRRVKAGETPGYPRFKSAGRYDSFTYPQSGYSVCGTKLTLSKIGEVKLKLHRQPQGEIKTCTVLVKNGKYYASLSCEVESNTAPESKGTVGIDLGVKYLAITSNGEFYEHPKFLRESERKLHRKQRSVSRKKKGSSRRGEAIRELARLHEHIANQRRDYAHKVSRKLVNGYGLIAFEKLNVQGMVKNHHLAKSIVDASWNQLIQYTTYKAEEAGRRVVLVDPKNTSQLCSNCGEIVHKKQSERVHSCNHCGYVQDRDINAAQNILKRALA

SEQ ID NO: 4022 - protein, 266 aa, unidentified
MIKTQVVKLKVNKTIQKHLDALCDYRRYCWNKGLETWQLMYEAHTLNKKDNPSPNERRVRDELVANKADWQYDLSARCLQLAIKDLANAWKNFFDKAQPDWGIPSFKSKKAPRQGFKTDRAKIVNGKLRLDRPRSISKADWFDLKSYEALKMNEVKVISIFKEKDSYYAALPYEEEISSKAKNHQKTAVDVNVGHFNYTDGKINVLPAKLQKLYKRIKHYQRMLARKREVNGKLATKSNNYFAVRTKLQRDYRKVANIQNDLLQQF

SEQ ID NO: 4023 - protein, 286 aa, unidentified
MIKTQVVKLKVNKTMQKHLDALCDYRRYCWNKGLETWQLMYEAHTLNKKDNPSPNERRVRDELVTNKADWQYDLSARCLQLAIKDLANAWKNFFDKAQPDWGIPSFKSKKSPRQGFKTDRAKIVNGKLRLDRPRSISKDSWHDLSSYEVLKMSEVKVVSIFKEKGAYYAALTYEEEPISKTKTHQKTAVDVNVGHFNYTDGKINVLPAKLQKLYKRIKHYQRMLARKREVNGKLATKSNNYYAVRIKLQRDYRKVANIQNDLLQQFTTKLVDNYDQIVIEDLAVKQ

SEQ ID NO: 4024 - protein, 407 aa, unidentified
MTRLALVTTEAKTSEATGHARWTFRLRVSAGARAGLEAAWGRCRWVWNECVARSKKAHRGGERCGPAALDKMLTEARRITPWLREGSSVPQQQLIRDFGRSRAKALKDIKDRLPMHRRAGMPRWKKKRDADPTLNYTRRGFRLKDGRLHLAGGIVVRVVWSRELPADPSSVRVYRDSVGHWYASFVVPAQAEPLPRTGRVLGVDWGVRETATTTSDAHDLPHAEHGRKGAAKLGRHQRMMARRRAPKGTPPSNGYRTAERQAAKLHQKVARQRQDAARKWAKKVVRDHDVVAVEDFRPRFLARTSMARKAADAAIGATKAALIEMGRKHQRDIRLVHPAHTTMDCARCGARTKHALPLSERTYTCTTCGVASPRDKNSARVMLVRAGLDPAGAEGVRPPGPPVRKAA

SEQ ID NO: 4025 - protein, 414 aa, unidentified
MATREKVSGDAGHARYTYRLRVSSTARAGLEAEWARCRWVWNECVAMSRKVHHLNRDAAEKTTCGPAQLDKMLTEARTAMSWLREGSSVPQQQTIRDFATSRAKALKDIKARLPLRQRAGMPKPKKKREALPTLNYTQRGFRLKDGRLHVAGGIVLTVVWSRDLPAAPTSVRVYQDSAGHWYASFVVASEVQPLPATGAVLGVDWGVRETATTTSDAHDLPHAQHGKTAAQKLARYQRMMARRRPDRGQAASKGYRKAQAQAAKLHKKVARQRQDTARKWAKRVVRDHDAIAVEDFRPKFLAKTTMARKAADAAIGATKTALIEMGRKHGRDIRLVHPAHTTMDCASCGARTKHALPPSERTYTCTACGVVSPRDKNSARVMLVRAGLNPAGADRVRAGGPLVPSQREPGIPAL

SEQ ID NO: 4026 - protein, 353 aa, unidentified
MKTLKLRIKDKHCKVLDQLASEVNFVWNYVNDLGFRHLKRKGEFLSAFDIAKYMKGTSKECNLHSQTIQAVTEELVTRRKQFKKAKLKWRVSNKKSARRSLGWIPFKKVAIKYANGYVQYGKHQFKLWDSYGLSKYTLKTGSFVEDSRGRWYVCLVVESPKQDKSTATKAIGIDLGLKDIATCSDGTVISNPKFYRKYEQKLGIAQRARNKKRVRALHAKIANSRKDHLHKASTKLVNENALIIVGDLSAKKLVKTKMAKSVLDTGFSALKTMLKYKCENAGVLFEEVQEAYTTQICSCCGEITSSSPKGRTDLGIREWECMSCGTAHDRDINSALNILALGHKRLAVGITLF

SEQ ID NO: 4027 - protein, 398 aa, unidentified
MVKEPGDGGHARYTYRLRASSTACTALLAEWDRCRWLWNECVARSKKAHREGEKCGPAMLDKMLTESRSVTPWLAAGSSVPQQQLIRDFGRSRAKSLKDIRDRLPQGLRAGMPTYKKRCEADPTLNYTRRGFRMKDGRLHLAGGIVLTVVWSRNLHADPSSVRVYRDSLGHWYASFVVPAEVQPLPETGRVIGIDWGVKETATTTSDAHDLPHAGHGQKAQAKLARYDRMMARRKPAKGQAASKGYHEAKSWRAKTCKKIAWQRQDAGRKWAKKVVADHDAIAVENFRPKFLARTTMARKAADAAIGATKKALIDMGRKHGRDVRLVHPAHTTMDCASCGARTKHALPLSERTYTCTACGAVSPRDKNSARVMLVRAGLNPAGVEGVRPPGALLQEAA

SEQ ID NO: 4028 - protein, 369 aa, unidentified
MLRAYRTEINPSFEQRQTINQTIGTCRWMYNKFIETNQNFHKTGQSYMNGYAFSKWMNNVYLPNNPDKHWIKQSASKAVKQSIMNAHRAYQTFFKNKKGYPKFKKKSGIGSYYLIGTIHVQRHRIQLPKLGWIKLKEKSYIPTNNIKSATIVKEYDRYYVSVLVDQLPSPIFKPKQTDGIGIDLGLKEAVFTPSGVKIRSFKTNQTIVKLDKSLKRQQRKLSRKKKGSHNWYKQLLKLQRIYRRIKNIKRNIKHKGILSIVRTNPQFITVENLNIKGMMRNKRLANSFQQIVLGYIVEWLKIKCQDYGIELRQVDRFYPSSQICSDCGYIQPMPLNQRTYHCHHCGMIKDRDINASINLKQATDYTVIV

SEQ ID NO: 4029 - protein, 405 aa, unidentified
MLTGRRYLLAFTPEQAAYAEQVGAVCRAVWNTALEQRREYRRRGSWINYNEQARQMAEAKKDPDCGWLADAPSHVLQQTLRDLEQACRTHGTWRVRWRSKARTAPSFRFPDAKHIAVRRLSRRWGEVRLPKFGPVRFRWSRSLGGPVRNATVSRDGGRWYISFCVEDGVTEAAPNGKPPIGVDRGVAVAVARSDGGLDDRAFVTPGEAARLKRLQQRLSRSLRVHGRNRGSKRRDKVRAEIGRLNARIRHRRADFVTQEAVQLVRDHGLVVVEGLRIKKMTASAKGTVEQPGRNVRQKAGLNRAILSKGWGGFLLKLEHAARYHGAKIEKVNPAYTSQTCNACKHVASESRESQAVFRCVACGHQDHADVNAAKNILAAGLAVTGRGDLAVGRSVKRQPPARLAA

SEQ ID NO: 4030 - protein, 415 aa, unidentified
MIQRGYRYKLKPTPAQERLFAQCAGVCRLIYNLALEQRRDHWRSFKRQTGSSISYPSQARELTELRAEYDWIANVSQTCQQQALRDLDRAYQNWFKGIASYPSPRKKGRNDTFRFQGREVRVRKLNGTWSDVRLPKIGWVRFRDTRPLRGKVNNATISLAPNGWHVSFTLAIEHEAPVNIAPAVGVDRGVANTLALSTGERMSVPASIAALERRQRRAQRELSRRKRGSKRYAKARARVSALSARRARIRKDWHHRVSLELARRFGTVVLEDLNTKGMTASARGTIDEPGRNVRQKAGLNRAILNQGWHIFEALLSYKLKERGGELRKVPARHTSQTCSACGAVDSRSRKNQAHFVCTSCGHFENADTNAAKVILRRNTAPMLVEEGHRISVEARTIGEAKSQTGNLRPSGRGRC

SEQ ID NO: 4031 - protein, 386 aa, unidentified
MTIKTQVVKLKVNETMQKHLDVLCDYRRYCWNKGLETWQLMYEAHTLNKKDNPSPNERRVRDELVANKADWQYDLSARCLQLAVKDLANAWKNFFDKTQPDWGIPNFKSKKAPRQGFKTDRAKIVNGKLRLDRPRSISKKDWFDLKSYEALKMNEVKVVSIFKEKDSYYAALPYEEEISSKAKTHQKTAVDVNVGHFNYTDGKIDVLPAKLQKLYKRIKHYQRMLARKREVNGKLATKSNNYFVVRTKLQRDYCKVANIQNDLLQKFTTKLVDNYDQIVIEDLAVKEMMMTHVASKGMQRSLFSKFRQILTYKCDWYGKELILADKRYPSTQRCAKCGYVKKGDEKITLQGNQKHGTKHNEYVCYECGYSNDRDKNAVLNLLALAK

SEQ ID NO: 4032 - protein, 378 aa, unidentified
MSSVTSSLKVTRNYKFRLYPNKEQESQLLRWLETCRWIYNTALAQRKETWERERRTVTRIEQQVWLKEAKKTDEHLREIHSQVAQEVLFRVERAFAAFFRRVKNGETPGYPRFKGRGRYKSITFTQFGEGKGASFQDGKLRLSKIGLVKIKLHREIHGTIKTVIVKRDAAGKWWAVFAVEKELTQSQANNGPAVGLDAGLEKFAALSDGSIIENPRHLRKTEKRLKHAQRNLSRKVKGSRNREKARQKLARLHAKIHNQRRDFLHKQSRRLVETYGLIAVEKLNIKGMVKNHRLAKSISDAGWGEFMAMLEYKAAEAGARLVKVNPSGTSQECSGCGMDVPKELSERTHYCPYCGLILDRDVNAARNILKKALALEAA

SEQ ID NO: 4033 - protein, 369 aa, unidentified
MTRNYKFRLYPNKEQESQLLRWLETCRWIYNTALAQRKETWERERRTVTRIEQQVWLKEAKKTDEHLREIHSQVAQEVLFRVERAFAAFFRRVKNGETPGYPRFKGRGRYKSITFTQFGEGKGASFQDGKLRLSKIGLVKIKLHREIHGTIKTVIVKRDAAGKWWAVFAVEKELTQSQANNGPAVGLDAGLEKFAALSDGSIIENPRHLRKTEKRLKHAQRNLSRKVKGSRNREKARQKLARLHAKIHNQRRDFLHKQSRRLVETYGLIAVEKLNIKGMVKNHRLAKSISDAGWGEFMAMLEYKAAEAGARLVKVNPSGTSQECSGCGMDVPKELSERTHYCPYCGLILDRDVNAARNILKKALALEAA

SEQ ID NO: 4034 - protein, 407 aa, unidentified
MATLWKGSGDAGHVRYTYRLRMSSTARTALRAEWDRCRWVWNECVAKSRQVHVHNWQHPEKQTCGPAQLDKMLTEARAKTPWLCEGASVPQQQTIRDFAKARSKALKDIEKRLPVWQRAGMPRPKKKREALPTLNYTTRGFRLKDGRLHLAGGIVVTVVWSRELPSAPSSVRVYRDSLGHWYASFVVAAETRPLPATGRVIGVDWGVKETATTTSDDHDLPHVQHGKTAAQRLARYQRMMGRRKPARGQAASRGYREARRQAAKMHKKVARRRQDTARKRAKKVVRDHDAIAVEDFRPKFLARTTMARKAADAAISTTKTTLIEMGRKHGRDVRLVYPAHTTMDCASCGARTKHALPLSERTYTCTACGVMSPRDKNSARVMLVRAGLIPAGVEGVRPPGALLPEGA

SEQ ID NO: 4035 - protein, 419 aa, unidentified
MNYNYRYRLEPTESQRETLDYHRDTCRQLYNHALYRFNQIPEDEGTVKQRVRTIRDELPDLKDWWDALTDVYSKVLQPTVMRIAKNITRLGQLKERGYKIGELRWKSPREFRSFTYNQSGFELDKKGGQTVLSLSKLADIPIELHRPLPEDATIKQVTLKKEKTGEWFAIFGIEMDTEPPAKPPLPDIDTDEMVGIDVGILKYAHDTDGTAVESLDLSEERDRLEREQRKLSGKEHGSNNWEKQRQRVAECHLDIKRKRRDFLHKLSNYYAREYKLVAVEDLDVKGMLESPRNSRNTASAAWNTFTDMLETKCEREGTHFVEIDPDGTTKECAQCGVETDKPLWVREHSCPACGFEADRDANAAWNILFRGLTELGVGHSEGTPVETALPAGTAVVPAKRVVEAGSPTLSERVSASRVG

SEQ ID NO: 4036 - protein, 419 aa, unidentified
MHYAYRFRLKPTTEQRELLDYHRDTCRQLYNHALGEFTEIPESAGTLNQRVRQVRNQLTDLKDWWEELNDLYSTVAQAAVMRIEDSIKALSELKEKGYNVGSLNWKAPRDFRSFTYVQSGFEFDKKNGQTVLSLSKLADIPIECHRKIPDDETVKEVTLKKEPTGEWYASFAVDNKEEPPKPSLAEIDADDMVGIDVGILKYVHDTDGTAAGSLDLSDERDRLKREQRNLSRKKHGSNNWEKQRQRVAECHQQIKRKRRDFLHKLSNYYAREYELVAVEDLDVKGMLESAGNSRNTASATWNTFTDLLEYKCKREGAHFVEVDPEDTTKECASCGVKTDKPLWVREHSCPACGIEADRDANAAWNILSRGLSELGVGHSEETPVETALPTGTAVVPAKRVVEAGSPCLKEPPKAASRQG

SEQ ID NO: 4037 - protein, 362 aa, unidentified
MVRTYKFRLYPTTEQLEKIQFTLERCRLLYNRLLDERIHAYKMEGKTLTYGQQTNTFRERKQHISTLKEVYSQVLQDVARRLDKAYQSFFRRIKNGDKAGFPRFKPQNRYDSFTYPQSGFDLDGKHIELSKIGQVRIKLHRQPQGTIKTCTITVKNGRYYACLSCEVEAEPLPETNRRVGVDLGIKHLAATSDGQMFAAPNHLRNNEAKLKRQQKSLSRKQYGSMRRRKAIMALARQHERVANQRKDYAHQISKTLVDNYDIIAFEELNVQMMVKNRHLAKSIADAGWSILVQFVTYKAESAGRQVVRVDPHNTSQCCSACNKIVKKTLAERMHRCPHCGATIDRDVNAAINILSRAMRQVS

SEQ ID NO: 4038 - protein, 359 aa, unidentified
MLIAYKYRLYPNREQRKTMDFTLERCRLLYNRLLDERIHAYKNEGKSLNYYDQANMFNERKKAVPALRQVHSQVLQDVAKRLDKAFQAFFRRVRAGEKPGFPRFNPASQYNSFTYPQGGYKLERNKLKLSKIGEVKTKLHRPVEGKIKTCTIIQKNCKYYACLVTEVGYQPLPHCSEHVGVDLGLRHLAVTSEGETFDTPKYLRKSEKRLKRMQRSVSRKDRGSNRRKKAVRILALMHEHVANQRKDYAHKLSRGLVNRFGLIAFEDLNTLGMVKNHHLAKSIADAGWYQLVQFTKYKAESAGRIVKQVDPRHTSQLCSHCGKIVKKELKERIHNCPHCGFVADRDVNAAINILQRATA

SEQ ID NO: 4039 - protein, 361 aa, unidentified
MLVAYKYRIYPTKEQKQQIQFTLERCRLLYNRLLEERILAYKQEGKTPNYYDQANTFNERKQHIPALKQVHSQVLQDVAKRLDKAYQAFFRRVKQAETPGFPRFKPQSRYDSFTYPQGGYTIHGNKIKLSKIGEVKIKLHRELQGKMKTCSILVKNGKYYACFSCEVEAKPLPITNMKVGIDLGLKHLAIPSEGEPIESPKYLRLSEQRLKHLQRAVSKKKKGSKRRSKAVHQLAKLHEHVANQRKDHAHKVSRKLVNQYQLIAFEDLNVLGLVKNHHLAKSIVDAGWQQLVQFVMYKAESAGRQVVQVNPYNTSQQCSNCGEIVKKTLSERTHQCSCGYVADRDVNAAINILNLALKNVS

SEQ ID NO: 4040 - protein, 361 aa, unidentified
MLVAYKYRIYPTKEQKQKIQFTLKRCRLLYNRLLEERILAYKQEGKTPNYYDQANTFNERKQHIPALKQVHSQVLQDVAKRLDKAYQAFFRRVKQAETPGFPRFKPQSRYDSFTYPQGGYTIHGNKIKLSKIGEVKIKLHRELQGKMKTCSIIIKNGKYYACFSCEVEAKPLPITNMKVGIDLGLKHLAIPSEGEPIESPKYLRLSEQRLKHLQRAVSKKKKGSKRRSKAVHQLAKLHEHVANQRKDHAHKVSRKLVNQYQLIAFEDLNVLGLVKNHHLAKSIVDAGWQQLVQFVMYKAESAGRQVVQVNPYNTSQQCSNCGEIVKKTLSERTHQCSCGYVADRDVNAAINILNLALKNVS

SEQ ID NO: 4041 - protein, 361 aa, unidentified
MLVAYKYRIYPTKEQKQKIQFTLERCRLLYNRLLEERILAYKQEGKTPNYYDQANTFNERKQHIPALKQVHSQVLQDVAKRLDKAYQAFFRRVKQAETPGFPRFKPQSRYDSFTYPQGGYTIHGNKIKLSKIGEVKIKLHRELQGKMKTCSIIIKNGKYYACFSCEVEAKPLPITNMKVGIDLGLKHLAIPSEGEPIESPKYLRLSEQRLKHLQRAVSKKKKGSKRRSKAVHQLAKLHEHVANQRKDHAHKVSRKLVNQYQLIAFEDLNVLGLVKNHHLAKSIVDAGWQQLVQFVMYKAESAGRQVVQVNPYNTSQQCSNCGEIVKKTLSERTHQCSCGYVADRDVNAAINILNLALKNVS

SEQ ID NO: 4042 - protein, 361 aa, unidentified
MLVAYKYRIYPTKEQKQKIQFTLERCRLLYNRLLEERILGYKQEGKTPNYYDQANTFNERKQHIPALKQVHSQVLQDVAKRLDKAYQAFFRRVKQAETPGFPRFKPQSRYDSFTYPQGGYTIHGNKIKLSKIGEVKIKLHRELQGKMKTCSIIIKNGKYYACFSCEVEAKPLPITNMKVGIDLGLKHLAIPSEGEPIESPKYLRLSEQRLKHLQRAVSKKKKGSKRRSKAVHQLAKLHEHVANQRKDHAHKVSRKLVNQYQLIAFEDLNVLGLVKNHHLAKSIVDAGWQQLVQFVMYKAESAGRQVVQVNPYNTSQQCSNCGEIVKKTLSERTHQCSCGYVADRDVNAAINILNLALKNVS

SEQ ID NO: 4043 - protein, 361 aa, unidentified
MLVAYKYRIYPTKEQKQKIQFTLERCRLLYNRLLEERILAYKQEGKTPNYYDQANTFSERKQHIPALKQVHSQVLQDVAKRLDKAYQAFFRRVKQAETPGFPRFKPQSRYDSFTYPQGGYTIHGNKIKLSKIGEVKIKLHRELQGKMKTCSIIIKNGKYYACFSCEVEAKPLPITNMKVGIDLGLKHLAIPSEGEPIESPKYLRLSEQRLKHLQRAVSKKKKGSKRRSKAVHQLAKLHEHVANQRKDHAHKVSRKLVNQYQLIAFEDLNVLGLVKNHHLAKSIVDAGWQQLVQFVMYKAESAGRQVVQVNPYNTSQQCSNCGEIVKKTLSERTHQCSCGYVADRDVNAAINILNLALKNVS

SEQ ID NO: 4044 - protein, 361 aa, unidentified
MLVAYKYRIYPTKEQKQKIQFTLERCRLLYNRLLEERILAYKQEGKTPNYYDQANTFNERKQHIPALKQVHSQVLQDVAKRLDKAYQAFFRRVKQAETPGFPRFKPQSRYDSFTYPQGGYTIHGNKIKLSKIGEVKIKRHRELQGKMKTCSILVKNGKYYACFSCEIEAKPLPITNMKVGIDLGLKHLAIPSEGEPIESPKYLRLSEQRLKHLQRAVSKKKKGSKRRSKAVHQLAKLHEHVANQRKDHAHKVSRKLVNQYQLIAFEDLNVLGLVKNHHLAKSIVDAGWQQLVQFVMYKAESAGRQVVQVNPYNTSQQCSNCGEIVKKTLSERTHQCSCGYVADRDVNAAINILNLALKNVS

SEQ ID NO: 4045 - protein, 361 aa, unidentified
MLVAYKYRIYPTKEQKQKIQFTLERCRLLYNRLLEERILAYKQEGKTPNYYDQANTFNERKQHIPALKQVHSQVLQDVAKRLDKAYQAFFRRVKQAETPGFPRFKPQSRYDSFTYPQGGYTIHGNKIKLSKIGEVKIKLHRELQGKMKTCSIIIKNGKYYACFSCEAEAKPLPITNMKVGIDLGLKHLAIPSEGEPIESPKYLRLSEQRLKHLQRAVSKKKKGSKRRSKAVHQLAKLHEHVANQRKDHAHKVSRKLVNQYQLIAFEDLNVLGLVKNHHLAKSIVDAGWQQLVQFVMYKAESAGRQVVQVNPYNTSQQCSNCGEIVKKTLSERTHQCSCGYIADRDVNAAINILNLALKNVS

SEQ ID NO: 4046 - protein, 361 aa, unidentified
MLVAYKYRIYPTKEQKQKIQFTLERCRLLYNRLLEERILAYKQEGKTPNYYDQANTFNERKQHIPALKQVHSQVLQDVAKRLDKAYQAFFRRVKQAETPGFPRFKPQSRYDSFTYPQGGYTIHGNKIKLSKIGEVKIKLHRELQGKMKTCSILVKNEKYYACFSCEVEAKPLPITNMKVGIDLGLKHLAIPSEGEPIESPKYLRLSEQRLKHLQRAVSKKKKGSKRRSKAVHQLAKLHEHVANQRKDHAHKVSRKLVNQYQLIAFEDLNVLGLVKNHHLAKSIVDAGWQQLVQFVMYKAESAGRQVVQVNPYNTSQQCSNCGEIVKKTLSERTHQCSCGYVADRDVNAAINILNLALKNVS

SEQ ID NO: 4047 - protein, 413 aa, unidentified
MHYAYRFRLNPTAKQRELLDYHRDTCRQLYNHALGEFEQIPDSAGTLNQRVRQVRDQLTDLKEWWDELNDLYSTVAQAAVMRIEDSIKALSELKQNSYNVGSLNWKAPQEFRSFTYVQSGFEFDSKNGQPVLSLSKLADIPIVKHREIPDDMTVKEVTIKKEPTGEWFASFVVDGKQTPEKPADPERCVGIDVGILKYAHDTDGTAVESLDLSDERERLERAQRDLSRKEHGSNNWERQRKVVARRHADLKRKRRDFLHKLSAYYATEYDLVAVEDLDAKGLVELPGNSRNRASAAWGTFKRMLEYKCEREGAHFVAVDPKDTTKECASCGAKTDKPLWVREHSCPSCGFEADRDANAAINILSRGLKQLGVGHSESTPVETELPVDTPISAKRVIEAGSPILKERTASAVSE

SEQ ID NO: 4048 - protein, 420 aa, unidentified
MNYNYRYRLTPTEDQRETLDYHRDTCRQLYNHALYRFNQILDDEGTVKQRVRKIRDELPDLKDWWDALTDVYSKVLQPTVMRVAKNINALGKLKAQGYNVGELRWKSPREFRSFTYNQSGFELDKKSGQTVLSLSKLADIPIELHRPLPDDATVKEVTLKKEKTGEWFAIFGIEMNTEPPAKPPLEDIDTDEMVGIDVGILTYAHDTDGTAVESLDLSEERDRLEREQGKLSRKEHGSNNWETQRRRVAACHLQIKRKRRDFLHKLSNYYARAYDLVAVEDLDVKGMLESPRNSRNTASAAWNTFTDMLEYKCEREGTHFVEVDPDGTTKECAQCGVETEKPLWVREHSCPACGFKADRDANAACNILSRGLTDLGVGHSEGTPVETALPAGTAVVPAKRVVEAGSPCLKEPPKAASRPG

SEQ ID NO: 4049 - protein, 370 aa, unidentified
MSSPKGIRNYKFRIHPNKEQERKLTNWLATCRIIYNSALADRKNYYERNSKGLTRIAQQETLKADKAKRPQVKKVHSQVAQEVLFRVERAYNNFFRRVQAGEKPGYPRYKGPGQYKSLTFTQFGDGLGASFQNDKLKLSKIGLVKIDLHREIYGKAKTCTIKHEQSGKWYAIITVEEYPVLYSPNWQSIGLDVGIKEFAVLSNGEKIANPKHLQKSERKLKTLQRSLARKKKGSKNRARVRLKLAKQHEKVRNQRKDFHHQLSNQLVWKYGKIIVEDLQITNMVKNHSLAKSISDAGWGEFISMLTYKAESAGRVLEKVPPHGTTQECSRCGNIVKKSLSVRIHACPHCGLVLDRDHNAAINIVHKTKAS

SEQ ID NO: 4050 - protein, 328 aa, unidentified
MIKTQVVKLKVNKTIQKHLDALCDYRRYCWNKGLETWQLMYEAHTLNKKDNPSPNERRVRDELVANKADWQYDLSARCLQLAIKDLANAWKNFFDKAQPDWGIPSFKSKKAPRQGFKTDRAKIVNGKLRLDRPRSISKADWFDLKSYEALKMNEVKVISIFKEKDSYYAALPYEEEISSKAKNHQKTAVDVNVGHFNYTDGKINVLPAKLQKLYKRIKHYQRMLARKREVNGKLATKSNNYFAVRTKLQRDYRKVANIQNDLLQQFTTKLVDNYDQIVIEDLAVKQMMMTHVASKGMQRSLFSRFRQILTYKCNWYGKELILADKTYP

SEQ ID NO: 4051 - protein, 413 aa, unidentified
MINLTYQFRLDLNRQQELEIEQILDVCRSVYNYALVERKHWLRSRKSPVNSCSIVSEYIIPSEQPYPNYNVQAKNLTIAKQNNQDLKSVNAQVLQQTLKTLDKAFADMKSQGRGFPRYKKKMRSFVFPAMLKNCLAIGKIKLPQLGWLKIRQSREYPIGFVPKQARIVKKASGYYLLIVFQSQEVCRDLPIGKNSLGLDAGIESFVATSTGKLIKAPKFLLKAQSKLKSLQRCLKHKTKGSNNGLKLQNKIGRLHEKVSNTRKDWHFKLGHNLCDLAENIFIEDINYTAWSRGIVRKPSLDSGIGGFMNQVLPYVCWKRDRFYLKVDKNGTSQECPHCGKHTGKKQLSERVHNCQYCGHTEPRDIPSAKVIRNRGLIAVGHTVSENACEVPLIGSDVLAGFEQLRLFDLVKCH

SEQ ID NO: 4052 - protein, 389 aa, unidentified
MKYNLDKGCHAVYNLTSGLKATRNYKFRLYPHKEQESQLLRWLETCRWIYNTALAQRKEAWERERRTVTRIEQQVWLKEAKKTDEHLREIHSQVAQEVLFRVERAFAAFFRRVKNGETPGYPRFKGKGRYKSITFTQFGEGKGASFQDSKLRLSKIGLVKIKLHREIHGTIKTVIVKRDAAGKWWAIFAVEKELTQSQAHTGPAVGLDAGLEKFAALSDGSIIENPRHLRKTEKRLKHAQRNLSRKVKGSRNREKARQKLARLHAKIHNQRRDFLHKQSRRLVETYSLIAVEKLNIKGMVKNHRLAKSISDAGWGEFMTMLEYKAAEAGARLVKVNPSGTSQECSGCGMDVPKELSERTHYCPYCGLILDRDVNAAKNILKKALALEAA

SEQ ID NO: 4053 - protein, 413 aa, unidentified
MINLTYQFRLDLNRRQELEIEHILDVCRSVYNYALAERKHWLRSRKSPINSCSLVSEFIIPADQPYPNYNVQAKNLTIAKQKNQDLKSVNAQVLQQTLKTLDKAFTDMKSQGRGFPRYKKKMRSFVFPAMLKNCLAIGKVKLPQLGWLKIRQSREYPTGFVPKQARIVKKASGYYLLIVFQSQEVCPDIPIGKTSLGLDAGIESFLATSTGELIKAPKFLLKAQSQLKSLQRRLKHKNKGSNNWLKLQNKIGRLHEKVSNTRKNWHFKLAHNLCDLGENIFIEDINYTSWSRGIVRKPSLDSGIGGFMNQVLPYVCWKRDGFYLKVDKNGTSQECPNCGKHTGKKQLSERVHNCQYCGHTEQRDIASAKVIRNRGLIAVGHTVSENACEVPLIGSDVLAGFEQLTLFELVKCH

SEQ ID NO: 4054 - protein, 413 aa, unidentified
MINLTYQFRLDLNRRQELEIEHILDVCRSVYNYALVERKHWLRSRKSPVNSCSIVSEYIIPSEQPYPNYNVQAKNLTIAKQNNQDLKSVNAQVLQQTLKTLDKAFTEMKSQGRGFPRYKKKMRSFVFPAMLKNCLATGKIKLPQLGWLKIRQSREYPTGFVPKQARIVKKASGYYLLIVFQSEEVCPDIPIGKNSLGLDAGIESFVATSTGELIKAPKFLLKAQSKLKSLQRRLKHKTKGSNNGLKLQNKIGRLHEKVSNTRKDWHFKLAHNLCDLAENIFIEDINYTSWSRGIVRKPSLDSGIGGFMNQVLPYVCWKRDRFYLKVDKNGTSQECPHCGKHTGKKQLSERVHNCQYCGHTEPRDIASAKVIRNRGLIAVGHTVSENACEVPLIGSDVLAGFEQLTLFELVKCH

SEQ ID NO: 4055 - protein, 358 aa, unidentified
MLKTYKYRLYPTKEQSHKMHEICFLCSLVYNQFLEERREAWEIFGVSLSCYEQIKALPIKKEDDPRLKQVFSQVLQDVARRVDKTFRAFFRRVKAGETPGYPRFKPAQRYNSFTYPQSGFSLKDNRLVLSKIGPVKIKLHRPMDGKVKTLTIRRQNGKWYACFSVEIDAVPLPPTGKVCGIDMGLEKFLTTSNGEMFHNPRQLRQAEKKLKQHQRRVSRRKKGSNRRKKAVRDLARCHEKVANQRRDLHHKVACSLVNRYDMIAIEDLQVKNMTQNHHLAKSIADAGWGNFRLILTSKAESAGRKVVEVDPKHTSQLCSRCGAEVKKKLSQRWHHCPACGLSIDRDVNAAINILKRAV

SEQ ID NO: 4056 - protein, 358 aa, unidentified
MLKAYKYRLYPTKEQSRKMHETCFLCSLVYNQFLEERREAWEIFGVSLSCYEQIKALPIKKEDDPRLKQVFSQVLQDVARQVDKTYQAFFRRVKAGETPGYPRFKAARRYDSFTYPQSGFSLKDNRLVLSKIGPVKIKLHRPMDGKVKTLTIRRQNGKWYACFSVEIDAVPLPPTGESCGIDVGLEKFVTTSDGEMFDNPRQLRQAEKKLKQHQRRVSRRKKGSNRRKKAVRELARCHEKVANQRRDLHHKVARSLVNRYDVIAIEDLQVKNMTQNHHLAKSIADAGWGNFRLILTSKAESAGRKVVEVDPKQTSQLCSRCGAEVKKKLSQRWHHCPVCGLSIDRDINAAINILKRAV

SEQ ID NO: 4057 - protein, 368 aa, unidentified
MYNPKEHRNYKFRIYPTKTQAETLTNWLTLCRLCYNAALADRKNHYLRNKASLTRTKQQTILKLDKDKHPQLKEVHSQVLQEVLLRVEKAYQAFFRRVKAGENPGYPRYKGMGQYNSLTYTQFGEGLGACFKEEKLALAKIGLVKIKLHREIPGKVKTCIIKRETTGKWYAVLSVEEYPVLYSPNWKKTGLDVGIEKLATLSDGEQIPNPKPIQKSEKKVKCAQRDLSRKKKGSKNRDKARQRLAKIHERIRHQRQDYLHKTANYLVWKYGKIVAEDLQIQNMLKNHHLAKSIADAGWGYLFSMLSYKAESAGREFIRVIAHGSSQECSQCGAIVKKDLAERVHRCPHCGLVLDRDHNAAKVLEKRVS

SEQ ID NO: 4058 - protein, 431 aa, unidentified
MIYRAFRYKLAPTGEQEVLLRQFAGVVRLVYNLALEQRRDWWRHYRRQTGNRLNYIAQARELTALRAAFDWIAAVHVTPQQQALRDLDKAYANFLAGRAGYPSRRKKGVNRAFRFQGREIEVKRLNGKWSAARLPKIGWVKFRDTRLLRGKTMNVTVSLAANGWHIVFACEIDHAVPQNDLPAVGIDRGVANTLTLSTGEHWWMPAGLAEIERRKRRAQRVLARRKRGSRRHAKARRRVAALQARAARIRQDWRHKASLAIARRFATVVLEDLATRNMTRSARGTVDAPGTNVCQKAGLNRAILEQGWHGFETVLAYKLEERGGYLCKVDPRHTSQTCSACAAVDRQSRESQASFRCCQCGLRAHADHNAAINILRRNTASMIVEEGQRLSVEAITIGGASRPLGNPPLQAGEDVNHHCQTTIGVLFGTRS

SEQ ID NO: 4059 - protein, 252 aa, unidentified
MIKTQVVKLKVNKTMQKHLDALCDYRRYCWNKGLETWQLMYEAHTLNKKDNPSPNERRVRDELVTNKADWQYDLSARCLQLAIKDLANAWKNFFDKAQPDWGIPSFKSKKSPRQGFKTDRAKIVNGKLRLDRPRSISKDSWHDLSSYEVLKMSEVKVVSIFKEKGAYYAALTYEEEPISKTKTHQKTAVDVNVGHFNYTDGKINVLPAKLQKLYKRIKHYQRMLARKREVNGKLATKSNNYYAVRIKLQRDY

SEQ ID NO: 4060 - protein, 252 aa, unidentified
MIKTQVVKLKVNKTIQKHLDALCDYRRYCWNKGLETWQLMYEAHTLNKKDNPSPNERRVRDELVANKADWQYDLSARCLQLAIKDLANAWKNFFDKAQPDWGIPSFKSKKAPRQGFKTDRAKIVNGKLRLDRPRSISKADWFDLKSYEALKMNEVKVISIFKEKDSYYAALPYEEEISSKAKNHQKTAVDVNVGHFNYTDGKINVLPAKLQKLYKRIKHYQRMLARKREVNGKLATKSNNYFAVRTKLQRDY

SEQ ID NO: 4061 - protein, 432 aa, unidentified
MTEQVKEAPAELIQTRVYELRPNKTMRKVLDEACDYRRYCWNQGLALWNEMYKARQTLKSSLSTDSKKLTEEQKVLLKDKPSPSERRVRNMLVADKKDWQYTQSARILQLAISDLGKAWNNFFDKAQPGWGKPKFRSKREARQGFKSDQSKIKDGILYLERAKESSVPKDQWRGFKLSEKPLSDEFGVVSYFKEKGRYYVAIPYKIKAEDIKLPDKTGKATAVDVNVGHFDYTGGRMNVLPKKLDKIYGKIKHYQRQLAKKQVKNGEAACESENYLKTKAKLQACYRKASNIQNDLMQKFTTELVNNYDKIVIENLSVKGMLMSHVASKGVHRSMFGKFKQFLTYKCDWYGKELILANNLYPSTQRCAACGNVKKGDDKITLYGNKKHGTKHNEYVCYNQKCPNYNKVVDRDKNAMLSLLALTEHPELNHAL

SEQ ID NO: 4062 - protein, 402 aa, unidentified
MGVGEGSRVRYTYRLRVSLTARVALEAEWARCRWVWNECVAKSKQVQERGRRTGVKETCGPAGLDRMLTEARRVMPWLREGSSVPQQQMIRDFGKARAKALKDIADRLPVNRRAGMPKLKKKRDTSLSLNYTTRGFQLRDGRLHLAKGIALTVVWSRELPSRPSSVRVYRDSLGHWYASFVVATSAEVLPATGAVIGIDWGVAETATTTSDAHDLPHAEFGSRAAQRLARYQRQMARRKPKHGQPSSRGYKESQRQAAKAHKKVARQRQDTGRKWAKRVVTDHDVIAVEDFKPTFLTKTTMARKAADAAIGATKAALVAMARKHGRDLRLINPAHTTMDCAQCGTRAKHRLPLSERTYTCTACGASSPRDKNSARVMLVRAGLNPAGAEGVRPVGALLPQAA

SEQ ID NO: 4063 - protein, 407 aa, unidentified
MATLRKGSGDAGHVRYTYRLRMSSTARTALRAEWDRCRWVWNECVAKSRQVHVHNRQHPEKQTCGPAQLDKMLTEARAKTPWLCEGASVPQQQTIRDFAKARSKALKDIEKRLPVWQRAGMPRPKKKREALPTLNYTTRGFRLKDGRLHLAGGIVVTVVWSRELPSAPSSVRVYRDSLGHWYASFVVAAETRPLPATGRVIGVDWGVKETATTTSDDHDLPHVQHGKTAAQRLARYQRMMGRRKPARGQAASRGYREARRQAAKMHKKVARRRQDTARKWAKKVVRDHDAIAVEDFRPKFLARTTMARKAADAAISTTKTTLIEMGRKHGRDVRLVYPAHTTMDCASCGARTKHALPLSERTYTCTACGVMSPRDKNSARVMLVRAGLIPAGVEGVRPPGALLPEGA

SEQ ID NO: 4064 - protein, 420 aa, unidentified
MNYNYRYRLKPTEDQRETLDYHRDTCRQLYNHALYRFNQIPEDEGTVKQRVRKIRDEIPNLKDWWDALTEVYSKVLQPTVMRVAKNIKALGNLKEQGYKVGELRWKSPREFRSFTYNQSGFELDKKSGQTVLSLSKLATIPIELHRPLPDDATVKEVTLKKEKTGEWFAIFGIEMDTEPPAKPPLEDIDTDEMVGIDVGILKYAHDTDGTAVESLDLSEERDRLEREQRKLSRKEHGSNNWENQRRRVAECHLDIKRKRRDFLHKLSNYYAREYELVAVEDLDVKGMLESPRNSRNTASAAWNTFTDMLETKCEREGTHFVEVDPDGTTKECAQCGVETDKPLWVREHSCPACGFEADRDANAAWNILSRGLTELGVGHSEATPVETALPVDTAVVSAKRVVEAGSPCLKEPPTAASRQG

SEQ ID NO: 4065 - protein, 422 aa, unidentified
MNYNYRYRLRLTDSQRETLDYHRDTCRQLYNHALYRFNQIPEDEGTVKQRVRKIRDELPDLKDWWDALTDIYSKVLQPTVMRIAKNINALGELKEQGYKVGELQWKSPREFRSFTYNQSGFELDKKGGQTVLSLSKLADIPIELHRPLPEDATLKEVTLKKEKTGEWFAIFGIEMDTEPPAKPPLEEIDAEEVVGIDVGILKYAHDTDGTAVESLDLSEERDRLEREQRKLSRKEYESNNWENQRRRVAECHLDIKRKRRDFLHKLSNYYAREYELVAVEDLDVKAMLESPRNSRNTASAAWNTFTDLLETKCEREGTHFVEVEPDGTTKECAQCGVETDKPLWVREHSCPACGFEADRDANAAWNILSRGLSDLGVGHSESTPVETALPAGTTLVPAKRVLEAGSPCLKERAAPPRVSRQG

SEQ ID NO: 4066 - protein, 414 aa, unidentified
MINRGLRYKLSPSSEQEALFRQFAGVCRLVYNLALEQRRDWWRQYNSETGRHFNYASQCRELTRLRAEYDWIAAVTQTCQQQALRDLDKAFSNFLRGRSRYPTPRKKGINDAFRFQGREVEVEKVSAKWSAVRLPKIGWVKFRDTRPLRGAVKNVTVSLDALGWHASFACEIEHFAPANTCPPVGIDRGVANTLALSTGERMSVPASLQAIERRQRVAQRTLARRKKGSARRLRQLQRCARLAARRARIRRDWQHKAALDISRSFGCVVLEDLNIRNMTASARGTIEEPGRMVRQKSGLNRSILNQGWFGFETILAYKLDERGGRLLKVSPAFTSQTCSECGAVESQSRESQAAFVCQHCGFRAHADHNAAINILRRNTASMRMEEGHKPPGEVRTGREFPLPENPQAEAGGGC

SEQ ID NO: 4067 - protein, 372 aa, unidentified
MLKAFKYRIYPTKSQNTKMNRTLELCRWTYNETLAYRKNAYEKESITVSKYETHNLLPLWKKDKPELKEVFSQTLQNVQERVDLAFKAFFRRVKAGEKPGYPRFKGKGWYDSFSYPQMGFRLENGLLKLSKIGNLKIKFHRPIEGKIKRLTVRRSATGKWFACFSVEIEDLPKPPWKDGSMVGIDVGLESFATLSNGEKIPNPRFFREEEQELARVQRKLSKAPKGTHERKKALKVVERVHERIANKRYEFAHQVSRDLVDRFGLIAFEDLNIKGMMHNHCLAKSIGDVAWNMLVNITSYKAASAGSMVVLVDPRNTSKMCSRCGILVEKDLSERTHNCSQCGLSLDRDWNAAINILRLGTQSLQNARSSAL

SEQ ID NO: 4068 - protein, 461 aa, unidentified
MIEEKRNKIKNSLRITRERRKTQDVIILKLKIDNDKLNNNTIKALNTIFLEAKWLYNYVINKEFNNDIFNIDPKIKNVNVYVKDHYEKRKINYLSSQMKEEIINRAIDNIRGLHKLKEKGLKIGKLKFKSFITSIPLNQYTITYKIINNNYIKIQNIKQLLKVNGLDNLECYYEPASALLINKNSNYYIYITAYRNKYILEKPVNNQKIISFDLGIKNQLTCSNGSILNYNIPKSKKEIRLQRSLSRKAKYAEGSKNKLSKKQSKNYYKTKNKLNREQNKTTNKRKDTINKITHYLTSNYDIVITQNDNIRGWKHHYGRKIESTGIGGIIDALKHKASTLILLDKFIPTTKECSNCHNKYNIKLDERIYQCTNCGFIIDRDYNSALNMIYYGIIKLNELLKIKNKKLNNYFKKYNINLNVPMECRELTPVEIIASGFEGLNISPYVKLSMVNEAGSLYALA

SEQ ID NO: 4069 - protein, 460 aa, unidentified
MIETKRNKIKNSLRITRERRKTQDVIILKLKIDNDKLNNNTIKALNTIFLEAKWLYNYILDKEFNNDIFNIDPKIKNVNVYVKDHYETRKLKYLSSQMKEEIINRAMDNIRGLHKLKEKGSKVGKLKFKSFITSIPLNQYTITYKIINNNYIKIQNIKQLLKVNGLDNLECYYEPASALLINKNNNYYIYITAYKNKYILEKPVNNQKILSFDLGIKNQLTCSNGLILNYNIPKSKKEIRLQRSLSRKAKYVEGTKKLSREQSKNYYKNKNKLNREQNKTTNKRKDTINKITHYLTSNYDIVVTQNDNIRGWKHLFGKRIESTGIGGIIDALKHKASTLILIDRFISTTKECSNCHNKYNIKLDERIYNCPNCGFIIDRDYNSALNDMYYGIIKLNELLKIKNRKLNNYFKKYNINLNVPMERRELTPVEIIASGFEGPNVSPYVKLSMVNEAGSLYALA

SEQ ID NO: 4070 - protein, 461 aa, unidentified
MIEAKRNKIKNSLRITKERRKTQDVIILKLKIDNDKLNNNTIKALNTIFLEAKWLYNYVINKEFNNDIFNIDSKIKNVNVYVKDHYETRELKYLSSQMKEEIINRGIDNIRGLHKLKEKGFKIGKLKFKSFITSIPLNQYTITYKIINNNYIKIQNIKQLLKVNGLDNLECYYEPANALLINNNNNYYINITAYKNKYILEKPVNNQKIISFDLGIKNQLTCSNGSILNYNIPKSKKEIRLQRSLSRKAKYAEGSKNKLSKKQSRNYYKTKNRLNREQAKTTDKRKDTINKIVHYLTSNYDIVITQNDNISGWRRLFGKKIESTGIGGIIDALKHKASTLILIDRFIPTTKECSKCHNKYDIKLDERIYQCHNCGFIIDRDYNSSLNMIYYGIIKLNELLKIKNKKLNSYFKKYNININVPMEHRELTPVEIIASGFEGLNISPYVKLSMVNEAGSLYALA

SEQ ID NO: 4071 - protein, 466 aa, unidentified
MRKRAMMSEERRNKIKNSLRITRERRKTQDVIILKLKIDNDKLNNNTIKALNTIFLEAKWLYNYVINKEFNNDIFNIDPKIKNVNVYVKDHYETRKLKYLSSQMKEEIINRAMDNIRGLHKLKEKGSKIGKLKFKSFITSIPLNQYTITYKIINNNYIKIQNIKQLLKVNGLDNLEYYYEPASALLINKNSYYYIYITAYKNKYILEKPVNNQKIISFDLGIKNQLTCSNGSILNYNIPKSKKEIRLQRSLSRKAKYAEGTKKLSREQSKNYYKNKNRLNREQTKTANKRKDTINKIVHYLTSNYDIVITQKDNISGWKHLFGKRIENTGIGEIIDALKHKASTLILLNQFIPTTKECSNCHNKYDIKLDERIYNCPKCGFIIDRDYNSSLNDMYYGIKKLNELLKIKNRKLNNYFKKYNINLNVPMERRELTPVEIIASGFEGLNISPYVKLSMVNEAGSLNALA

SEQ ID NO: 4072 - protein, 460 aa, unidentified
MSEERRNKIKNSLRITRERRKTQDVIILKLKIDNDKLNNNTIKALNTIFLEAKWLYNYVINKEFNNDIFNIDPKIKNVNVYVKDHYETRKLKYLSSQMKEEIINRAMDNIRGLHKLKEKGSKIGKLKFKSFITSIPLNQYTITYKIINNNYIKIQNIKQLLKVNGLDNLEYYYEPASALLINKNSYYYIYITAYKNKYILEKPVNNQKIISFDLGIKNQLTCSNGSILNYNIPKSKKEIRLQRSLSRKAKYAEGTKKLSREQSKNYYKNKNRLNREQTKTANKRKDTINKIVHYLTSNYDIVITQKDNISGWKHLFGKRIENTGIGEIIDALKHKASTLILLNQFIPTTKECSNCHNKYDIKLDERIYNCPKCGFIIDRDYNSSLNDMYYGIKKLNELLKIKNRKLNNYFKKYNINLNVPMERRELTPVEIIASGFEGLNISPYVKLSMVNEAGSLNALA

SEQ ID NO: 4073 - protein, 391 aa, unidentified
MTTQAQTAESSGHARYAYRLRVSSTARAELEAEWDRCRWVWNECVAKSKQVHTRNKATGGKATCGPAQLDKMLTQARRATPWLAEGASVPQQQLIRDFAKSRAKALKDIKARLPMRQRAGMPKWKKKHEADPSLNYTHRGFRLKDGRLHLAGGIVVRVVWSRDLPEPPSSVRVYRDSTGHWYCSFVVATTTEQLPETGAVIGVDWGVKETATTTSDAHDLPHPQHGRTAAQKLARYQRMMARRKPARGQSGSKGYREAKRQTAKLYSRVARQRQDTGRKWAKKVVRDHDALAVEDFRPKFLAKSTMARKAADAAIGATKRALLQMARKHGRMVHLVHPAHTTMDCAQCGARTKHALPLSERTYACTVCGAVSSRDKNSARVMLVRAGLCPG

SEQ ID NO: 4074 - protein, 400 aa, unidentified
MLNRGYKFRLYATDEQESLFGQYAGVCRLVYNLALEQRRDWWRQVKANTGYNISYASQCRELTLLRAEFDWIAAVSIICQQQALRDLDKAFANFFAGRANHPTPRKRALNDAFRFNGRDCPWRKLNAKWAAVTLPKIGEVKVRLTRDIPGTVKNVTVTRDALGWHVVFSVEVEHDTPATFDPAVGIDRGVVHTLALSDGTFRDLPKERLNVLDQRARKQARALAKKTRGSNRRNAAHRALARTKAKAARLRLHWNHERSREIADRFGMVVLEDLKIGTMTASAKGTTAEPGRKVRQKAGLNRAILNNGWYQFECFLSYKLAERGGALHKVNPAYTSQACSVCGTIDKSSRESQATFHCGQCGHTANADTNAARNILRVGTQPAPRSAVGRPVKRKLKRVA

SEQ ID NO: 4075 - protein, 402 aa, unidentified
MGVGEGSRVRYTYRLRVSLTARVALEAEWARCRWVWNECVAKSKQVQERGRRTGVKETCGPAGLDRMLTEARRVMPWLREGSSVPQQQMIRDFGKARAKALKDIADRLPVNRRAGMPKLKKKRDTSLSLNYTTRGFQLRDGRLHLAKGIALTVVWSRELPSRPSSVRVYRDSLGHWYASFVVATSAEVLPATGAVIGIDWGVAETATTTSDAHDLPHAEFGSRAAQRLARYQRQMARRKPKHGQPSSRGYKESQRQAAKAHKKVARQRQDTGRKWAKRVVTDHDVIAAEDFKPTFLTKTTMARKAADAAIGATKAALVAMARKHGRDLRLINPAHTTMDCAQCGTRAKHRLPLSERTYTCTACGASSPRDKNSARVMLVRAGLNPAGAEGVRPVGALLPQAA

SEQ ID NO: 4076 - protein, 418 aa, unidentified
MHYAYRYRLHPTEDQRETLDYHRDTCRQLYNHALNEFEQIPDSAGTLNQRVRQVRDQLPALKDWWAELTDLYSTVTQAAVMRIEDSIKTLSQLKENGYNVGSLNWKAPSEFRSFKYVQSGFEFDKKNGQTVLSLSKLADIPISYHREIPEDVTVKEVCVKKERTGEWYASFAVEGKQEPVKPDNPDRCVGIDVGILKYAHDTDGRAVGSLDLQDERERLIREQRSLSRKQHGSNNWEKQRLRVAECHQRVRRKRHDFLHKLSNYYATEYDLVAVEDLNVKSMLESPGNSQNTASAAWDAFTTMLKYKCKREGTHFVEVEPAGTTKECASCGVESDKPLWVREHSCPACGFKMDRDANAALNVLSRGFEKLGLGQSEDTTPVETALPMFIPSDASDVVDVKRVVETGSPTLKEAASAAE

SEQ ID NO: 4077 - protein, 432 aa, unidentified
MTEQIEEVPAELIQKRVYELHPNKTMRRVLDEACDYRRYCWNQGLALWNEMYKARQTLKSSLPSDSKRLTEEQKVLLKEKPSPSERRVRNMLVADKKDWQYTQSARMLQLAISDLGKAWNNFFDKAQPGWGKPKFRSKREARQGFKSDRSKIKEGILYLERAKESSVPKDQWRGFKLSEEPLSDEFGVVSYFKEKGRYYVAIPYKIKAEDVKLPDKTGKATAVDVNVGHFDYTGGRVNVLPKKLDRIYKKIKHYQRQLAKKQVKNGEAACESENYLKTKAKLQACYRKASNIQNDLMHKFTTELVNDYDKIVIENLSVKGMLMSHVASKGVHRSMFGKFKQILTYKCDWYGKDLILANKLYPSTQRCAACGNVKKGDDKITLYGNKKHGTKHNEYVCYNEKCPNYNKVVDRDKNAMLSLLALTEHPELNHAL

SEQ ID NO: 4078 - protein, 407 aa, unidentified
MTTLKKGSGDAGHVRHTYRLRMSSTARTALWAEWDRCRWVWNECVAKSRQVHVHNRQHPEKQTCGPAQLDKMLTEARAKTPWLCEGASVPQQQTIRDFAKARSKALKDIEKRLPVWQRAGMPRPKKKREALPTLNYTTRGFRLKDGRLHLAGGIVVTVVWSRDLPSAPSSVRVYRDSLGHWYASFVVAAETRPLPATGRVIGVDWGVKETATTTSDDHDLPHVQHGKTAAQRLARYQRMMGRRKPARGQAASRGYREAQRQAAKMHKKVARRRQDTARKWAKKVVRDHDAIAVEDFQPKFLARTTMARKAADAAISATKTTLIEMGRKHGRDVRLVHPAHTTMDCASCGARTKHALPLSERTYTCTACGVMSPRDKNSARVMLVRAGLIPAGVEGVRPPGALLQEAA

SEQ ID NO: 4079 - protein, 386 aa, unidentified
MTIKTQVVKLKVNKTMQKHLDALCNYRRYCWNKGLETWQLMYEAHTLNKKDNPSPNERRVRDELVANKADWQYDLSARCLQLAIKDLANAWKNFFDKSQPDWGIPSFKSKKAPRQGFKTDRAKIVNGRLRLDRPRSISKESWFDLKSYEALKMDEVKVVSVFKEKDNYYAALPYEEEIKLKAKTQQKTAVDVNVGHFNYTEGQINILPAKLQKLYKRIKHYQRMLARKREVNGKLATKSNNYFAVRTKLQRDYRKAANIQNDLLQKFTTKLVNNYDQIVIEDLAVKEMMMTHVASKGMQRSLFSKFRRILTYKCDWYGKELILADKTYPSTQRCAACGYVKKGEEKITLQGNKKHGTKHNEYVCYECGYKNDRDENAVLNLLALAK

SEQ ID NO: 4080 - protein, 432 aa, unidentified
MHYAYRFRLNPTPEQREQLDYHRDTCRQLYNHALNEFEQIPDSAGTLNQRVRQVRDQLTDLKEWWNELNDLYSTVAQAAVMRVEDSIKALSELKERGYNVGSLNWKAPQDFRSFTYVQSGFEFDSKNGQPVLSLSKLADIPIVNHREIPDDVTIKEVTIKKEPTGEWFASFAVDGKQTPEKPTDSERCVGIDVGILKYAHDTDGTAVGSLDLSDECERLERAQRDLSRKEHRSNNWEKQRKVVAQRHADLKRKRRDFLHKLSNYYATEYDLVAVEDLDAKGLVELPGNSRNRASAAWGTFKRMLEYKCDREGTHFVAVDPKDTTKECASCGVKTEKPLWVREHSCPSCGFEADRDANAAINILSRGYDQLGVGYSEETPVETALPVDTSVSAKRVVEAGSPITRSQRLLVSSQNSKSSDDTLKERTASAVSE

SEQ ID NO: 4081 - protein, 432 aa, unidentified
MAEQVKEAPAELIQTRVYELRPNKTMRKVLDEACDYRRYCWNQGLALWNEMYKARQTLKSSLSTDSKKLTEEQKVLLKDKPSPSERRVRNMLVADKKDWQYTQSARILQLAISDLGKAWNNFFDKAQPGWGKPKFRSKREARQGFKSDQSKIKDGILYLERAKESSVPKDQWRGFKLSEKPLSDEFGVVSYFKEKGRYYVAIPYKIKAEDIKLPDKTGKATAVDVNVGHFDYTGGRMNVLPKKLDKIYGKIKHYQRQLAKKQVKNGEAACESENYLKTKAKLQACYRKASNIQNDLMQKFTTELVNNYDKIVIENLSVKGMLMSHVASKGVHRSMFGKFKQFLTYKCDWYGKELILANKLYPSTQRCAACGNVKKGDDKITLYGNKKHGTKHNEYVCYNQKCPNYNKVVDRDKNAVLSLLALTEHPELNHAL

SEQ ID NO: 4082 - protein, 386 aa, unidentified
MTIKTQVVKLKVNKTMQKHLDALCDYRRYCWNKGLETWQLMYEAHTLNKKDNPSPNERRVRDELVANKADWQYDLSARCLQLAIKDLANAWKNFFDKSQPDWGIPSFKSKKAPRQGFKTDRAKIVNGKLRLDRPRSISKESWFDLKSYEALKMDEVKVVSVFKEKDNYYAALPYEEEIELKAKTQQKTAVDVNVGHFNYTEGQINILPAKLQKLYKRIKHYQRMLARKREVNGKLATKSNNYFAVRTKLQRDYRKAANIQNDLLQKFTTKLVNNYDQIVIEDLAVKEMMMTHVASKGMQRSLFSKFRRILTYKCDWYGKELILADKTYPSTQRCAACGYVKKGEEKITLQGNKKHGTKHNEYVCYECGYKNDRDENAVLNLLALAK

SEQ ID NO: 4083 - protein, 386 aa, unidentified
MTIKTQVVKLKVNKTMQKHLDALCDYRRYCWNKGLETWQLMYEAHTLNKKDNPSPNERRVRDELVANKADWQYDLSARCLQLAIKDLANAWKNFFDKSQPDWGIPSFKSKKAPRQGFKTDRAKIVNGKLRLDRPRSISKESWFDLKSYEALKMDEVKVVSVFKEKDNYYAALPYEEEIELKAKTQQKTAVDVNVGHFNYTEGPINILPAKLQKLYKRIKHYQRMLARKREVNGKLATKSNNYFAVRTKLQRDYRKAANIQNDLLQKFTTKLVNNYDQIVIEDLAVKEMMMTHVASKGMQRSLFSKFRRILTYKCDWYGKELILADKTYPSTQRCAACGYVKKGEEKITLQGNKKHGTKHNEYVCYECGYKNDRDENAVLNLLALAK

SEQ ID NO: 4084 - protein, 386 aa, unidentified
MTIKTQVVKLKVNKTMQKHLDALCNYRRYCWNKGLETWQLMYEAHTLNKKDNPSPNERRVRDELVANKADWQYDLSARCLQLAIKDLANAWKNFFDKSQPDWGIPSFKSKKAPRQGFKTDRAKIVNGRLRLDRPRSISKESWFDLKSYEALKMDEVKVVSVFKEKDNYYAALPYEEEIKLKAKTQQKTAVDVNVGHFNYTEGQINILPAKLQKLYKRIKHYQRMLARKREVNGKLATKSNNYFAVRTKLQRDYRKAANIQNDLLQKFTTKLVNNYDQIVIEDLAVKEMMMTHVASKGMQRSLFSKFRRILTYKCDWYGKELILADKTYPSTQRCAQCGYVKKGEEKITLQGNKKHGTKHNEYVCYECGYKNDRDENAVLNLLALAK

SEQ ID NO: 4085 - protein, 413 aa, unidentified
MYYAYKYRLKPSDAHREELDRHRDICRQLYNHTLYRLNEYQDEHGDLPSMTTLRSELPDLKKWWDGLSDVYSKVLQTVVERLFDNLKGLSKLKENGYAVGQLKWKPPREFRSFTYSQSGFKLDKKGGQTVLSLSKLADIPIRLHRAIPDDANLKQVTIKKEPTGEWFATFGVEMDREPPEPSENPEKCVGIDVGILKYAHDTDGTAVGSLDLSDERDRLEREQRKLSRKQHGSNNYEKQRRRVAECHADLRRKRRDFLHKLSAYYAREYDLVAVEDLNVKKMMETPSNSRNTASAAWRTFLSLLEYKCEREGTHFVAVNPRGTTKACASCGVSTDKPLWVREHSCPACGFEADRDANAAWNILFRGLEDVGVGYSESTPVETALPVDTPVSAKRVVEAGSPTLKERTASTVSE

SEQ ID NO: 4086 - protein, 412 aa, unidentified
MTAMAGQGSGHARFTFRLRVSSTAGAGLEAEWARCRWVWNECVAVSRRVHGLNKSAGQKVTCGPAHLDRMLTEARRSMAWLREGSSVPQQQVIRDFAKSRAKALKDIVARLPMGQRAGMPRIKRKREAAPTLNYTTRGFRIKDGRLHLAGGIVLTVVWSRDLPSAPSSVRVYRDSLGHWYASFVVTTAAEPLPAIGCVIGIDWGVKETATTTSDAHDLPHAQHGKTAAQRLARYQRMMARRKPARGQSASRGYRNARHQSAKLHKQVARRRQDTARKWAKRVVRDHDAIAVEDFRPKFLAKTTMARKAADAAIGATKAALIEMGRKHGRDVRLVHPAHTTMDCASCGARTKHALPLSERTYTCTACGAVSPRDKNSARVMLVRAGLNPAGADRVSAGGPPVPSPREPGIPVP

SEQ ID NO: 4087 - protein, 400 aa, unidentified
MAAVRESDGAGHARYTYRLRVSATAREALLAEWGRCRWVWNECVARSKKAHTDAEECGPARLDRLLTRARAITPWLAAGASVPQQQLIRDFGKSRAKALKDIKDRLPVRQRAGMPGYKKKHEADPSLNYTRHGFRLKEGRLHLAGGITLTVVWSRELPAEPSSVRVYRDSVGDWYASFVVPARVEPLPESGRALGVDWGVKEIATTTSDAHDLPHAEHGKKAKGKLSRYDRMMARRRPKKGQAASKGYGQAKKWRAKTYQKIARQRQDAARKWAKKVVRDHDAIAVEDFRPKFLAKTSMARKAADAAIGATKKALIEMGRKHGRDVRLVHPAHTTMDCGRCGARTKHALPLSERTYTCTACGMVSPRDKNSARVMLVRAGLAPAGVEGVRPPGALLQEAA

SEQ ID NO: 4088 - protein, 413 aa, unidentified
MYYAYKYRLKPSDAHREELDRHRDICRQLYNHTLYRLNEYQDEHGELPSMTTLRSELPDLKKWWDGLSDVYSKVLQTVVERLFDNLKGLSALKEDGYGVGQLKWKPPREFRSFTYSQSGFKLDKKGGQTVLSLSKLADIPIRLHRAIPDDAKLKQVTVKKEPTGEWFATFGVQMDREPPEPPETPEKCVGIDVGILKYAHDTDGTAVGSLDLSDERDRLEREQRKLSRKQHGSNNYEKQRRRVAECHADLRRKRRDFLHKLSNYYAREYDFVAVEDLNVKGMVESPSNSRNTASAAWRTFLSLLEYKCKRERTHFVAVNPRGTTKECASCGVSTDKPLWVREHSCPACGFESDRDANAAWNILSRGLEDVGVGHSESTPVETALSVDTPVSAKRVVETGSPTLKERTAQAVSE

SEQ ID NO: 4089 - protein, 420 aa, unidentified
MNYNYRYRLKPTERQRETLDYHRDTCRQLYNHALYRFNQTPEHEGTVKQRVRKIRDELPDLKDWWDALTDVYSKVLQPTVMRIAKNITALGKLKEQGYTVGELRWKSPREFRSFTYNQSGFELDKKGGQTVLSLSKLADIPIEHHRSLPDEATIKEVTLKQEKTGEWFAIFGIEMDTDPPAKPPLEDVGTDEMVGVDVGILKYAHDTDGTAVESLDLSEERDRLEREQRNLSRKEYESNNWKNQRQRVAACHQKIKRKRRDFLHKLSNYYAREYELVAVEDLDVKGMLESPRNSRNTASAAWNIFTDMLETKCEREGTHFVEVEPEGTSKECAQCGVETDKPLSVREHSCPACGFKADRDANAAWNILSRGLTKLGVGHSKGTPVETALPADTAVVSTKRVVETGSPCLKEPPKAVSRQG

SEQ ID NO: 4090 - protein, 420 aa, unidentified
MNYNYRYRLKPTERQRETLDYHRDTCRQLYNHALYRFNQIPEHEGTVKQRVRKIRDELPDLKDWWDALTDVYSKVLQPTVMRIAKNITALGKLKEQGYTVGELRWKSPREFRSFTYNQSGFELDKKGGQTVLSLSKLADIPIEHHRSLPDEATIKEVTLKQEKTGEWFAIFGIEMDTDPPAKPPLEDVGTDEMVGVDVGILKYAHDTDGTAVESLDLSEERDRLEREQRNLSRKEYESNNWKNQRQRVAACHQKIKRKRRDFLHKLSNYYAREYELVAVEDLDVKGMLESPRNSRNTASAAWNIFTDMLETKCEREGTHFVEVEPEGTSKECAQCGVETDKPLWVREHSCPACGFKADRDANAAWNILSRGLTKLGVGHSKGTPVETALPADTAVVSTKRVVETGSPCLKEPPKAVSRQG

SEQ ID NO: 4091 - protein, 413 aa, unidentified
MRYTYRFRLDPTPEQRELLDHHRDTCRQLYNHALNEFEKIPESAGTLTQRVRQVRDQLTDLKVWWDELNDLYSTVAQAAVMRIEDSIKALSQLKQNGYNVGSLNWKAPKDFRSFTYVQSGFEFDNKNGQTVLSLSKLADVPLIKHRTIPDTETTKQVTIKKEPTGDWFASFVVDGKETPEKPTDPDRCVGIDVGILKYAHDTDGYAIESPGFSDERERLERAQRDLSRKEHGSTNWETQRQIVAERHADLKRKRRDFLHKLSNYYATEYDLVAVEDLDVKGLVELPRNSRNRAGAAWGTFLGMLEYKCEREGTHFVAVNPRGTTKECASCGVKTEKPLWMREHSCPACGFEADRDANAAWNILSRGLEEVGVGYSESTPVETALPVDTPVSAKRVVETGSPTLKERTASAVSE

SEQ ID NO: 4092 - protein, 413 aa, unidentified
MRYTYRFRLDPTPEQRELLDQHRDTCRQLYNHALTEFEKIPESAGTLTQRVRQVRDQLTDLKVWWDELNDLYSTVAQAAVMRIEDSIKALSQLKQNGYNVGSLNWKAPKDFRSFTYIQSGFEFDSKNGQTVLSLSKLADVPLIKHRTIPDTETIKQVTIKKEPTGDWFASFVVDGKETPEKPTDPDRCVGIDVGILKYAHDTDGYAIESPDFSDERERLERAQRDLSRKEHGSTNWETQRQTVAERHADLKRKRRDFLHKLSNYYATEYDLVAVEDLDVKGLVELPRNSRNRAGVAWGTFLGMLEYKCEREGTHFVAVNPRGTTKECASCGVKTEKPLWMREHSCPACGFEADRDANAAWNILSRGLEEVGVGYSESTPVETALPVDTPVSAKRVVETGSPTLKERTASAVSE

SEQ ID NO: 4093 - protein, 413 aa, unidentified
MRYTYRFRLDPTPEQRELLDQHRDTCRQLYNHALTEFEKIPESAGTLTQRVRQVRDQLTDLKVWWDELNDLYSTVAQAAVMRIEDSIKALSQLKQNGYNVGSLNWKAPKDFRSFTYIQSGFEFDSKNGQTVLSLSKLADVPLIKHRTIPDTETIKQVTIKKEPTGDWFASFVVDGKETPEKPTDPDRCVGIDVGILKYAHDTDGYAIESPDFSDERERLERAQRDLSRKEHGSTNWETQRQIVAERHADLKRKRRDFLHKLSNYYATEYDLVAVEDLDVKGLVELPRNSRNRAGAAWGTFLGMLEYKCEREGTHFVAVNPRGTTKECASCGVKTEKPLWMREHSCPACGFEADRDANAAWNILSRGLEEVGVGYSESTPVETALPVDTPVSTKRVVETGSPTLKERTASAVSE

SEQ ID NO: 4094 - protein, 277 aa, unidentified
MRYTYRFRLDPTPEQRELLDQHRDTCRQLYNHALTEFEKIPESAGTLTQRVRQVRDQLTDLKVWWDELNDLYSTVAQAAVMRIEDSIKALSQLKQNGYNVGSLNWKAPKDFRSFTYIQSGFEFDSKNGQTVLSLSKLADVPLIKHRTIPDTETIKQVTIKKEPTGDWFASFVVDGKETPEKPTDPDRCVGIDVGILKYAHDTDGYAIESPDFSDERERLERAQRDLSRKEHGSTNWETQRQTVAERHADLKRKRRDFLHKLSNYYATEYDLVAVEDL

SEQ ID NO: 4095 - protein, 413 aa, unidentified
MHYAYRFRLNPTPEQREQLDYHRDTCRQLYNHALNKFEQIPDSAGTLNQRVRQVRDQLTDLKDWWEELNDLYSTVAQAAVMRIEDSIKALSELKERGYNVGSLNWKAPQDFRSFTYVQSGFEFDSKNGQPVLSLSKLADIPIVNHREIPDDVTIKEVTIKKELTGEWFASFAVDGKQTPEKPTDSERCVGIDVGILKYAHDTDGTAVGSLDLSDERERLERAQRDLSRKEHGSNNWEKQRKVVAQRHADLKRKRRDFLHKLSNYYASEYDLVAVEGLDAKGLVELPGNSRTRASAAWGTFKRMLEYKCDREGTHFVEVDPKDTTKECASCGVKTEKPLWVREHSCPSCGFEADRDANAAWNILSRGLEEVGVVHSESTPVETALPADTSVSAKRVVEAGSPTLKERTASAVSE

SEQ ID NO: 4096 - protein, 413 aa, unidentified
MYYAYKYRLKPSDAHRKELDRHRDICRQLYNHTLYRLNEYQDEHGELPSMTTLRSELPDLKKWWEGLSDVYSKVLQTVVERLFDNLKGLSALKKNGYGVGQLKWKPPREFRSFTYSQSGFKLDKKGGQTVLSLSKLADILIRLHRAIPDDAKLKQVTVKKEPTGEWFATFGVQMDREPPEPPENPEKCVGIDVGILTYAHDTDGTAVGSLDLSDDRERLEREQRKLSRKQHGSNNYETQRRRVAECHADLRRKRRDFLHKLSAYYAREYDLVAVEDLNVKGMMENPSNSRNTASAAWRTFLSLLEYKCEREGTHFVAVNPRGTTKECASCGVSTDKPLWVREHSCPACGFEADRDANAAWNILSRGLQDIGVGHSERTPVETALAVDTPVSVKRVVEAGSPTLKERTASAVSE

SEQ ID NO: 4097 - protein, 386 aa, unidentified
MTIKTQVVKLKVNKTMQKHLDALCDYRRYCWNKGLETWQLMYEAHTLNKKDNPSPNERRVRNELVANKADWQYDLSARCLQLAIKDLANAWKNFFDKAQPDWGMPSFKSKKAPRQGFKTDRAKIVNGKLRLDRPRSISKEDWFDLKSYEALKMSEVKVVSIFKEKDSYYAALPYEEEISSKAKTYQKTAVDVNVGHFNYTEGQINVLPAKLQKLYKRIKHYQRMLARKREVNGKSAIKSNNYFAVRIKLQRDYRKTANIQNDLLQQFTTKLVDNYDQIVIEDLAVKQMMMTHVASKGMQRSLFSRFRQILTYKCDWYGKELILADKTYPSTQRCAKCGYVKTGNEKITLQGNKKHGTKHNEYICYECGYSNDRDENAVLNLLALVK

SEQ ID NO: 4098 - protein, 369 aa, unidentified
MLRAYKTEINPSFEQRQTINRTIGTCRWIYNKFIETNQNFYTTGQSYMNGFAFSKWMNNVYLPSHPDKHWVKQSASKAVKQSIMNAHRAYQTFFKKQKGYPKFKKKSSIGSYYLIGTIHVQRHRIQLPKLGWIKLKERGYIPTNSIKSATIVKEYDRYYVSVLVDQPSSPIFKPKQTDGIGIDLGLKEAVSTPSGVRIKSFKTNQTIIKLDKSLKRQQRKLSRKKKGSHNWYKQLLKVQRLYRRIKNIKKDIKRKGILSIVRTNPQFITIENLNIKGMMRNKRLANSFQQIGLGYMVEWLKIKCRDYGIELRQVDRFYPSSQICSDCGHIQPMPLNQRTYHCNHCGMIKDRDTNASVNLKQATDYTVIV

SEQ ID NO: 4099 - protein, 369 aa, unidentified
MLRAYKTEINPSFEQRQTINRTIGTCRWIYNKFIETNQNLYKIGQSYMNGFAFSKWMNNVYLPSHPDKHWVKQSASKAVKQSIMNAHRAYQTFFKNKQGYPKFKKKSGIGSYYLIGTIHVQRHRIQLPKLGWIKLKERGYIPTNNIKSATIVKEYDRYYVSVLVDQPPLPIFKPKQTDGIGIDLGLKEAVFTPSGVKIRSFKTNQTIIKLDKSLKRQQRKLSRKKKGSHNWYKQLLKVQKLYRRIKNIKKDIKRKGIFSILRTNPQFITIENLNIKGMMRNKRLANSFQQIGLGYIVEWLKIKCRDYGIELRQVDRFYPSSRICSDCGHIQPMPLNQRTYHCNHCGMIKDRDINASINLKQAADYTVIV

SEQ ID NO: 4100 - protein, 369 aa, unidentified
MLRAYKTEINPSFEQRQTINQTIGTCCWIYNKFIETNQNFHKTGQSYMNGFAFSKWMNNVYLPSHPDKHWIKQSASKAVKQSIMNAHRAYQTFFKKQKGYPKFNKKSGVGSYYLIGTIHIQRHRIQLPKLGWIKLKEKGYIPTNNIKSATIVKEYDRYYVSVLVDQPPPPIFKPKQTEGIGIDLGLKEAVFTPSGVKIRSFKTNQIIIKLDKSLKRQQRKLSRKKKGSRNWYKQLLKVQRLYKRIKNIKKDIKRKGILSIVRTNPQFITVENLNIKGMMRNKRLANSFQQIGLGYIIEWLKIKCRDYGIELRQVDRFYPSSQICSDCDHIQPMPLNQRKYYCNHCGMKKDRDINASINLKQATDYTVIV

SEQ ID NO: 4101 - protein, 369 aa, unidentified
MLRAYKTEINPSFEQRQTINRTIGTCRWIYNKFIETNQNLYKIGQSYMNGFAFSKWMKNVYLPNNPDKHWVKQSASKAVKQSIMNAHRAYQTFFKNKQGYPKFKKKSGIGSYYLIGTIHVQRHRIQLPKLGWIKLKERGYIPTNNIKSATIVKEYDRYYVSVLVDQPPLPIFKPKQTDGIGIDLGLKEAVFTPSGVKIRSFKTNQTIIKLDKSLKRQQRKLSRKKKGSHNWYKQLLKVQKLYRRIKNIKKDIKRKGILSILRTNPQFITIENLNIKGMMRNKRLANSFQQIGLGYIVEWLKIKCRDYGIELRQVDRFYPSSRICSDCGHTQPMPLNQRTYHCNHCGMMKDRDINASINLKQATDYTVIV

SEQ ID NO: 4102 - protein, 369 aa, unidentified
MLRAYKTEINPSFEQRQTINQTIGTCRWVYNKFIETNQNFHKTGQSYMNGFAFSKWMNNVYLPSHPDEHWVKQSASKAVKQSIMNAHRAYRTFFKNKQGYPKFKKKSGIGSYYLIGTIHVQRHRIQLPKLGWIKLKERGYIPTNNIKSATIVKEYDRYYVSVLVDQPPPPIFKPKQTEGIGIDLGLKEAVFTPSGVKISSFKTNQTIVKLDKSLKRQQRKLSRKKKGSHNWYKQLLKVQRLYKRIKNIKKDIKRKGILSILRTNPLFITIENLNIKGMMRNKRLANSFQQIGLGYIVEWLKIKCQDYGIELRQVDRFYPSSQICSDCGHTQPVPLNQRTYHCNHCGMMKDRDINASINLKQATDYTVIV

SEQ ID NO: 4103 - protein, 369 aa, unidentified
MLRAFRTEINPSFGQRQTINQTIGTCRWMYNKFIETNQNFHKTGHSYMNGFAFSKWMNNVYLPSHPDKHWVKQSASKAVKQSIMNAHRAYQTFFKNKQGYPKFKKKSGIGSYYLIGTIHVQRHRIQLPKLGWVKLKEKGYIPTNNIKSATIVKEYDRYYVSVLVDQPPSPVFKSKQTEGIGIDLGLKEAVFTPSGVKIRSFKTNQMIVKLDKSLKRQQRKLSRKKKGSHNWYKQLLKVQRLYRCIKNIKRNIKRKGILSIVRTNPQFITVENLNIKGMMRNKRLANSFQQIGLGCIVEWLKIKCQDYGIELRQVDRFYPSSQICSDCCHIQPMPLNQRTYHCPHCGMIKDRDINASINLKQATDYTVIV

SEQ ID NO: 4104 - protein, 420 aa, unidentified
MNYNYRYRLKPTDRQRKTLDYHRDTCRQLYNHALYRFNQIPESDGTVKQRVRKIRDELPVLKDWWDALTDVYSKVLQPTVMRIAKNIKRLGQLKEQGYTVGELRWKSPREFRSFTYNQSGFELDKKDGQTVLSLSKLADIPIELHRPLPDDATVKEVTLKKEKTGEWFAIFGIEMDGEPPTKPSLADIDAENMVGIDVGILKYAQDTDGTAVESLDLSAERDRLEREQRTLSRKEYKSHNWKKQRQRVAECHFQIKRKRRDFLHKLSNYYAREYELVAVENLDVKGMLESARNSRNTASAAWNTFTDMLEYKCEREGTHFVEVEPEGTTKECAQCGVATDKPLWVREHSCPACGLKADRDANAAWNILLRGLTELGVDHSEGTPVETALPADTAVVSAKRVLEAGSPCLKEPPKAASRQG

SEQ ID NO: 4105 - protein, 431 aa, unidentified
MSVTILKKQKIKESLKKTKEKRKNQIPKVYQLKISYSNLNKDQKQWLERIFLEAKWLYNYCIADIQNRLNSKTEKSKQVEIKTPNGFETREITCLSSQMKQAVLDRIKKNLTDLSKAKQKGIKVGKLKFKSDYRNIPLKQNGITFKVLKDKNRIKIQGLKKPVRVLGLHQIPENSEIAKAELIKKPDGYYIYLTCFIDKNQTKEKKIKKPIAIDFGIKHQLTLSNGIKINYSVEETKRLKKLQKKLSKQKKGSNNYFKTKYKIQKEHQKIYNKRKDIQNKIFSLLKKYEYVLIQDEAVKQWQSGLFGKQVQNTGIGEIISRLKNNPETLIPVGRYEATTKICSNCGSRKEDIELSDRVYKCNSCGLVIDRDLNSAINILKIGLEKVETTTIKNLLTDCGEVTPVERKVSARILGSNPYIRVSYASVKQEAT

SEQ ID NO: 4106 - protein, 434 aa, unidentified
MSVTTLKKQKIKESLKKTKEKRRNQVPKVYQLKISYSNLNKDQKQWLEKVFLEAKWLYNYTVADIENRLNPQTEKLKQVEIKTPNGYEKREITCLSSQMKQGILDRIKKNLSNLSKAKQKGIKVGKLKFKSDYKNIPLKQNGITFKVLKDKNRVKIQGLKKPFRVLGLHQIPENSDIAKAELIKKPDGYYIYLTCYIDKNQIKKEKIKKPIAIDFGIKHQLTLSNGIKIKYSIEETKRLKRLQKKLTKQKKGSKNYFKTRYKIQREHQKIYNRRKDIQNKIFSLLKRYEHVLIQDEAIKQWHSGLFGKQIQNTGIGGIISRLKNNLETLISVDRYEATTKICSNCGNRKEDITLSDRTYRCENCGLVIDRDLNSTINILKIGLSKVETTTIKNLPTDCGKVTPVERKASARILESNPYIRVSYASVKQEAPNFS

SEQ ID NO: 4107 - protein, 345 aa, unidentified
MIKTQVVKLKVNKTIQKHLDALCDYRRYCWNKGLETWQLMYEAHTLNKKDNPSPNERRVRDELVANKADWQYDLSARCLQLAIKDLANAWKNFFDKAQPDWGIPSFKSKKAPRQGFKTDRAKIVNGKLRLDRPRSISKADWFDLKSYEALKMNEVKVISIFKEKDSYYAALPYEEEISSKAKNHQKTAVDVNVGHFNYTDGKINVLPAKLQKLYKRIKHYQRMLARKREVNGKLATKSNNYFAVRTKLQRDYRKVANIQNDLLQQFTTKLVDNYDQIVIEDLAVKQMMMTHVASKGMQRSLFSRFRQILTYKCNWYGKELILADKTYPSTQRCAACGYVKKGEEK

SEQ ID NO: 4108 - protein, 386 aa, unidentified
MTIKTQVVKLKVNKTMQKHLDALCDYRRYCWNKGLETWQLMYEAHTLNKKDNPSPNERRVRDELVANKADWQYDLSARCLQLAIKDLANAWKNFFDKSQPDWGIPSFKSKKAPRQGFKTDRAKIVNGRLRLDRPRSISKESWFDLKSYEALKMDEVKVVSVFKEKDDYYAALPYEEEIKLKAKTQQKTAVDVNVGHFNYTEGQINILPAKLQKLYKRIKHYQRMLARKREVNGKLATKSNNYFAVRTKLQRDYRKAANIQNDLLQKFTTKLVNNYDQIVIEDLAVKEMMMTHVASKGMQRSLFSKFRRILTYKCDWYGKELILADKTYPSTQRCAACGYVKKGEEKITLQGNKKHGTKHNEYVCYECGYKNDRDENAVLNLLALAK

SEQ ID NO: 4109 - protein, 418 aa, unidentified
MHYAYRYRLHPTESQRETLDYHRDTCRQLYNHALNEFEQIPDSAGTLNQRVRQVRDQIPDLKDWWNELTDLYSTVAQAAVMRIEDSIKALSQLKQNGYNVGSLNWKAPSEFRSFTYVQSGFEFDKKNGQTVLSLSKLADIPISYHREIPEDITVKEVSIKKERTGEWYASFAVEGKEEPAKPANPDRCVGIDVGILKYAHDTDGRAVGSLDLQDERERLTREQRSLSRKQHGSNNWEKQRLQVAECHQQLRRKRHDFLHKLSNYYATEYDLVAVEDLNVKSMLESAGNSQNTASAAWDTFTTMLEYKCKREGTHFVEVEPAGTTKECASCGVESDKPLWVREHSCPACGFEMDRDANAALNVLSRGFEKLGLGQSKATTPVETALPMFTSSGSFDVVDVQRVVETGSPTLKEAAPGSE

SEQ ID NO: 4110 - protein, 407 aa, unidentified
MPKRSLPSGLVRSRSFSLHPTDGQAEKFEQFAGVARLVYNLALEQRTNFWRQYLRSTGTHISYVTQDKEVTQLRAEIDWVAAVPTDVTSAALRDLHLAFAAFMSGKKGYPAFRSKEKTVSFRVRGRETPIRALNAKWSEIRLPKIGWVKFRCTRMIEVAKSVTVSRSGDQWRLCIACETASKPSAPKAAIGIDRGVANTLALSTGELAQLPGEIPRLVERRKRAQKALSRKVRRSKRYARQRERVRALAGRIAAVRNDWLHRQTRKISTSFNHVALEALRVTAMTASAKGTVEQPGRNVAQKRGLNRAILEQAWGIFARQLEYKVEERGGLLVYVNPAYTSQTCSACGVVDARSRESQAVFRCVACGHGEHADVGAAKEILRRSTACLDVEGARRRPAEASTKGVAA

SEQ ID NO: 4111 - protein, 383 aa, unidentified
MLATKYRMYPNKEQTKKLEFALDTCRQAYNMMLGELNNQIIIDRNMIQAMLPDLKICEPRFREVYSKTLQYECYKLFSNLSALKVLKGNHKKVGRLRFKGKGWFKTINYNQSGFSLENNKLHLSKIGNIKIKVHRDVNGNIKQIQIKKGIDRWYAIIITDEKKQIFCGNRIIGIDLGINNYLVDSKGNKTENPKILEQNLSKLKHLNKELSRKKKGSNNRKKARKRLSKLHLKITNQRTDFLHKITTNLVKECKTIVMEDLNIKQMSQQKYFNAKNRVDASWGKFTQLLNFKAESAGCQIVKVNPRNTSKTCSQCGRIQDMPLYKRTYECAECGFVIDRDYNSAINILNKLAGQELSGVEKSTSVPLEQVGSMKQEALSLEVG

SEQ ID NO: 4112 - protein, 402 aa, unidentified
MGVGEGSRVRYTYRLRVSSTARVALEAEWARCRWVWNECVAKSKQVQERGRRTGVKETCGPAGLDRMLTEARRVMPWLREGSSVPQQQMIRDFGKARAKALKDIADRLPVNRRAGMPKLKKKRDTSLSLNYTTRGFQLREGRLHLAKGIALTVVWSRELPSRPSSVRVYRDSLGHWYASFVVATSAEVLPATGAVIGIDWGVAETATTTSDAHDLPHAEFGSRAAQRLARYQRQMARRKPKHGQPNSRGYKESQRQAAKAHKKVARQRQDTGRKWAKRVVTDHDVIAVEDIKPTFLTKTTMARKAADAAIGATKAALVAMARKHGRDLRLINPAHTTMDCAQCGTRAKHRLPLSERTYTCTACGASSPRDKNSARVMLVRAGLNPAGAEGVRPVGALLPQAA

SEQ ID NO: 4113 - protein, 432 aa, unidentified
MYYAYKYRLKPSDAHREELDRHRDICRQLYNHALYRFNQIPEDAGTLNQRVRSIRDELPGLKGWWDGLSDVYSTVLQTTVMRIEQNITSLGKLKQNGYGVGQLKWKPPREFRSFTYSQSGFKLDKKGGQTVLCLSKLADIPIRLHRAIPDDATLKQVTLKKEPTGEWFATFGVEMDREPPEPPENPERCAGIDVGILTYAHDTDGMAVGSLDLSNERERLEREQRKLSRKQHGSNNYEKQRRRVAECHADLRRKRRDFLHKLSNYYAREYDLVAVEDLNVKGMVESPSNSRNTASAAWRTFLSLLEYKCEREGTHSVAVNPRGTTKECASCGVSTEKPLWVREHSCPACGFEADRDANAAWNILSRGLEDIGVGYSESTSSETLRGSDGLRKSLRDFRTPVETALPVDTPVSAKRVVEAGSPPLKREPSGER

SEQ ID NO: 4114 - protein, 386 aa, unidentified
MSLTARVALEAEWARCRWVWNECVAKSKQVQERGRRTGVKETCGPAGLDRMLTEARRVMPWLREGSSVPQQQMIRDFGKARAKALKDIADRLPVNRRAGMPKLKKKRDTSLSLNYTTRGFQLRDGRLHLAKGIALTVVWSRELPSRPSSVRVYRDSLGHWYASFVVATSAEVLPATGAVIGIDWGVAETATTTSDAHDLPHAEFGSRAAQRLARYQRQMARRKPKHGQPSSRGYKESQRQAAKAHKKVARQRQDTGRKWAKRVVTDHDVIAVEDFKPTFLTKTTMARKAADAAIGATKAALVAMARKHGRDLRLINPAHTTMDCAQCGTRAKHRLPLSERTYTCTACGASSPRDKNSARVMLVRAGLNPAGAEGVRPVGALLPQAA

SEQ ID NO: 4115 - protein, 360 aa, unidentified
MRVAFKYRLYPTREQKQTIHFTLERCRLLFNRLLEERILAYKTKGKNLNYYDQANTFKERKQHIPALKQVYAQVLQDVAKRLDKAFQAFFRRVKHGETPGFPRFKPQQRYDSFTYPQGGHAINGNKVRLSKIGDVKIKLHRQPQGKIKTCTITVKNGKYYACFSCEVDSQQLAVSDEKVGIDLGLLHLAVTSDGTTFEAPKQLRRNERRLKQLQRAVTRKKRGSNRRKKAVHILAKLHEKVANQRKDHAHKVSRQLVDRYGLIAFEHLNVRGMVKNRHLSKSIADAGWSQLVQFTTYKAESAGRVVVQVDPRHTSQLCSNCGSIVKKTLSVRVHRCDHCGYTADRDENAARNILQRALVS

SEQ ID NO: 4116 - protein, 418 aa, unidentified
MHYAYRFRLKPTSEQHELLDYHRDTCRQLYNHTLTEFTEIPDSAGTLNQRVRQVRDQLTDLKDWWDELNDLYSTVAQAAVMRIEDSIKALSELKERGYNVGSLNWKAPKEFRSFTYVQSGFEFDKKNGQTVLSLSKLADIPIECHRDIPDDETVKEVTLKKEPTGEWYASFAVDDKAEPAKPSLSDINADNIVGIDVGVLKYAYDTDGTAVGSLNLSEERNRLEREQRNLSRKDHGSNNWEKQRQRVAECHQQLKRKRRDFLHKLSAYYAREYDLVAVEDLDVKEMLESPRNSRNTASAAWNTFTNLLEYKCKREGTHLVEVDPDGTTKECASCGVKTDKPLWVREHSCPACGFKADRDANAAWNILSRGLSQLGVGHSEGTPVETALPTGTAVVPAKRVVEAGSPTLKKRAASAASE

SEQ ID NO: 4117 - protein, 411 aa, unidentified
MHYAYRFRLKPTAQQRELLDHHRDTCRQLYNHALMEFEQIPESAGTLNQRVRQVRDQLTDLKDWWSELNDLYSTVAQAAVMRIEDSITALSELKNKGYNVGSLNWKAPREFRSFTYVQSGFEFDKKNGQTVLSLSKLADIPIECHRNIPADETVKEVTLKKEPTGEWYASFAVDDKKEPVKPSLSDIDTDEMVGIDVGILKYAHDTDGTAVGSLELSEERDKLEREQRNLSRKEHKSNNWEKQRQTVAECHQQIKRKRRDFLHKLSAHYAREYELVAVEDLDVKGMLESPDNSRNTASAAWNTFTDMLEYKCKREGTHFVEVDPKDTTKECTSCSVKTDKPLWVREHSCPACGFEADRDANAVWNILSRGLAKLGVGHSEGTPVETALPTGTAVVPAKRVVEPGSPCLKEA

SEQ ID NO: 4118 - protein, 420 aa, unidentified
MNYNYRYRLTPTESQRETLDYHRDTCRQLYNHALYRFNQIPEDEGTVKQRVRKVRDELPDLKDWWDALTDIYSKVLQPTVMRIAKNVNALGELKEQGYTVGELRWKSPREFRSFTYNQSGFELDKKGGQTVLSLSKLADIPIELHRPIPEDATVKEVTLKKEKTGEWFAIFGIEMDTEPPSKPPFSEIDAENMVGIDVGILKYAHDTDGTAVESLDLSDERDHLEREQRNLSRKDYESNNWEKQRRRVAECYLRIKQKRRDFLHKLSAYYAREYEIVAVEDLDTKELLESPGNSRNTASAAWNTFTSMLETKCEREGTHFVEINPAGTTKECASCGVETEKPLWVREHSCPACGFEADRDANAAWNILSCGLSKLGVGHSEETPVETALPTGTTVVPAKRVVEPGSPCLTEPPTAASRQG

SEQ ID NO: 4119 - protein, 419 aa, unidentified
MHYAYRFRLKPTAEQRELLDYHRDTCRQLYNHALGEFNEIPESAGTLNQRVRQVRDQLTDLKDWWDELNDLYSTVAQAAVMRIEDSITALSELKDKGYNVGSLNWKAPREFRSFTYVQSGFEFDNKNGQTVLSLSKLADIPIECHRQIPDDEKVKEVTLKKEPTGEWYASFAVDDKEEPLKPSIEDIDADDMIGIDVGILKYTHDTDGTAVGSLDLADERDRLEREQRNLSRKEHGSNNWEKQRQTVAECHLDIKRKRRDFLHKLSNYYAQEYDLVAVEDLDVKGMLESPGNSRNTASAAWNTFTLMLEHKCKREGAHFVKVDPNGTTKECASCGVETDKPLWVREHSCPACGFEADRDANAAWNILLRGLAKLGVGHSEGTPVETALPVDTVVVSAKRVVEPGSPCLTEPPTAASRQG

SEQ ID NO: 4120 - protein, 416 aa, unidentified
MNYNYRYRLKPTESQRETLDYHRDTCRQLYNHALYRFNQIPESEGTVKQRVRNIRDELPDLKDWWDALTDIYSKVLQPTVMRIAKNINALGKLKQQGYTVGELRWKSPREFRSFTYNQSGFELDKKGGQTVVSLSKLADIPIELHRPLPDDATVKEVTLKKEKTGEWFAIFGIEMDTEPPAKPSLDEIAAENIVGIDVGILKYAHDTDGTAVESLDLTDERDRLEREQRNLSRKAYESNNWEKQRRRVAECHLRIKQKRRDFLHKLSNYYAQEYELLAVEDLDTKEMLESPGNSRNIASAAWNTFTSMLETKCEREGTHFVEVNPAGTTKECANCGVETDKPLWVREHSCPACGLEADRDANAAWNILSRGLSKLGVGHSEATPVETALPTGTAVVPAKRVVEPGSPCLKEAVADG

SEQ ID NO: 4121 - protein, 398 aa, unidentified
MAEHARYAYRLRVSSAARAALEAEWGRCRWVWNECVAMSRKVHDLNKGAAGKVTCGPAQLDRMLTEARRSMAWLRDGSSVPQQQTIRDFGKSRAKALKDIKAKLPVHRRAGMPRVKRKRDALPSLNYTRRGFSLKNNRLHLAGGIVLTVVWSRDLPSVPSSVRVYRDSLGHWYASFVVTTAVEALPATGCAIGIDWGVRETATTTSDTHDLPHAQHGRAAAQKLARYQRTMARRRPARGQAASRGYRQAQRQTAKLHKKVARQRQDTARKWARRVVRDHDAIAVEDFRPKFLAKSSMARKAADAAIGAAKTALLEMARKYGRAVHLVNPAHTTMDCERCGARVKHRLPLSERTYTCTACGAVSPRDKNSAYVMLVRAGLNPAGAEGRSPDGTLFRQAA

SEQ ID NO: 4122 - protein, 303 aa, unidentified
MRTYKFRLYPSKEDKRKLEETLELCRQIYNHFLEELNERNDVPPRTELQSQLPNLKNEWNKLNSVHSKVLQMVLHRLCSNLRSLSEKKKNGYKVGRLRFKGKGWFKTFTYNQSGFKVVKTKNRLDTLTLSKIGEVPIRIHREVKGEIKQVTIKRAQSGKWFACIQTDHEENRESGEGVVGIDLNTENYLTDSDGNVVENPRFLEEKEEKLKKEHRKLSRKEKGSKNREKQRIKLGKAYEKLVNCRRDFIHKLTTAYVENYDTIILEDLNIDEMCENSRYAKSNLDASWAYSRSCFYTRLRALV

SEQ ID NO: 4123 - protein, 252 aa, unidentified
MTEQIEEVPAELIQTRVYELRPNETMRRVLDEACDYRRYCWNQGLALWNEMYKARQALKSSLASDSKKLTEEQKVLLKEKPSPSERRVRNMLVADKKDWQYTQSARILQLAISDLGKAWNNFFDKAQPGWCKPKFRSKREARQGFKSDRSKIKDGILYLERARGSRVPKDQWRGFKLSEKPLSDEFGVVSYFKEKGRYYVAISYKIKAEDVKLPDKTGKATAVDVNVGHFDYTGGRVNVLPKKLDRIYKKIK

SEQ ID NO: 4124 - protein, 385 aa, unidentified
MIKTQVVKLKVNKTIQKHLDALCDYRRYCWNKGLETWQLMYEAHTLNKKDNPSPNERRVRDELVANKADWQYDLSARCLQLAIKDLANAWKNFFDKAQPDWGIPSFKSKKAPRQGFKTDRAKIVNGKLRLDRPRSISKADWFDLKSYEALKMNEVKVISIFKEKGAYYAALPYEEEISSKAKNHQKTAVDVNVGHFNYTDGKINVLPAKLQKLYKRIKHYQRMLARKREVNGKLATKSNNYFAVRTKLQRDYRKVANIQNDLLQQFTTKLVDNYDQIVIEDLAVKQMMMTHVASKGMQRSLFSRFRQILTYKCNWYGKELILADKTYPSTQRCAACGYVKKGEEKITLQGNKKHGTKHNEYICYECGYKNDRDKNAVLNLLALAR

SEQ ID NO: 4125 - protein, 385 aa, unidentified
MIKTQVVKLKVNKTMQKHLDALCDYRRYCWNKGLETWQLMYEAHTLNKKDNPSPNERRVRDELVANKADWQYDLSARCLQLAVKDLANAWKNFFDKSQSDWGIPSFKSKKAPRQGFKTDRAKIVNGKLRLDRPRSISKADWFDLKSYEALKMNEVKVISIFKEKGAYYAALPYEEEISSKAKTYQKTAVDVNVGHFNYTDGKINVLPAKLQKLYKRIKHYQRMLARKREVNGKLATKSNNYFAVRTKLQRDYRKVANIQNDLLQQFTTKLVDNYDQIVIEDLAVKQMMMTHVASKGMQRSLFSRFRQILTYKCNWYGKELILADKTYPSTQRCAACGYVKKGEEKITLQGNKKHGTKHNEYICYECGYKNDRDKNAVLNLLALAR

SEQ ID NO: 4126 - protein, 400 aa, unidentified
MSVVKEPGDGGHARYTYRLRASSTACTALLAEWDRCRWLWNECVARSKKAHREGEKCGPAMLDKMLTESRSVTPWLAAGSSVPQQQLIRDFGRSRAKSLKDIRDRLPQGLRAGMPTYKKRCEADPTLNYTRRGFRMKDGRLHLAGGIVLTVVWSRNLHADPSSVRVYRDSLGHWYASFVVPAEVQPLPETGRVIGIDWGVKETATTTSDAHDLPHAGHGQKAQAKLARYDRMMARRKPAKGQAASKGYHEAKSWRAKTCKKIAWQRQDAGRKWAKKVVADHDAIAVENFRPKFLARTTMARKAADAAIGATKKALIDMGRKHGRDVRLVHPAHTTMDCASCGARTKHALPLSERTYTCTACGAVSPRDKNSARVMLVRAGLNPAGVEGVRPPGALLQEAA

SEQ ID NO: 4127 - protein, 267 aa, unidentified
MIKTQVVKLKVNKTMQKHLDALCDYRRYCWNKGLETWQLMYEAHTLNKKDNPSPNERRVRDELVANKADWQYDLSARCLQLAIKDLANAWKNFFDKAQPDWGIPSFKSKKAPRQGFKTDRAKIVNGKLRLDRPRSISKADWFDLKSYEALKMNEVKVISIFKEKDSYYAALPYEEEISSKAKNHQKTAVDVNVGHFNYTDGKINVLPAKLQKLYKRIKHYQRMLARKREVNGKLATKSNNYFAVRTKLQRDYRKVANIQNDLLQQFT

SEQ ID NO: 4128 - protein, 258 aa, unidentified
MIKTQVVKLKVNKTMQKHLDALCDYRRYCWNKGLETWQLMYEAHTLNKKDNPSPNERRVRDELVTNKADWQYDLSARCLQLAIKDLANAWKNFFDKAQPDWGIPSFKSKKAPRQGFKTDRAKIVNGKLRLDRPRSISKADWFDLKSYEALKMNEVKVISIFKEKGAYYAALTYEEEPISKTKTHQKTAVDVNVGHFNYTDGKINVLPAKLQKLYKRIKHYQRMLARKREVNGKLATKSNNYFAVRTKLQRDYRKVANI

SEQ ID NO: 4129 - protein, 267 aa, unidentified
MIKTQVVKLKVNKTIQKHLDALCDYRRYCWNKGLETWQLMYEAHTLNKKDNPSPNERRVRDELVANKADWQYDLSARCLQLAIKDLANAWKNFFDKAQPDWGIPSFKSKKAPRQGFKTDRAKIVNGKLRLDRPRSISKADWFDLKSYEALKMNEVKVISIFKEKDSYYAALPYEEEISSKAKNHQKTAVDVNVGHFNYTDGKINVLPAKLQKLYKRIKHYQRMLARKREVNGKLATKSNNYFAVRTKLQRDYRKVANIQNDLLQQFT

SEQ ID NO: 4130 - protein, 258 aa, unidentified
MIKTQVVKLKVNKTMQKHLDALCDYRRYCWNKGLETWQLMYEAHTLNKKDNPSPNERRVRDELVTNKADWQYDLSARCLQLAIKDLANAWKNFFDKAQPDWGIPSFKSKKSPRQGFKTDRAKIVNGKLRLDRPRSISKDSWHDLSSYEVLKMSEVKVVSIFKEKGAYYAALTYEEEPISKTKTHQKTAVDVNVGHFNYTDGKINVLPAKLQKLYKRIKHYQRMLARKREVNGKLATKSNNYFAVRTKLQRDYRKVANI

SEQ ID NO: 4131 - protein, 379 aa, unidentified
MQKVQLTYKFRLYPKKGQDERLLETLELCRQTYNYFLAQWNGKQRIPSRLELQAQLPKLKAERPELSKVYSKVLQMVLHQLYSNLKALSRLKRNGKHVGRLRFKGKGWYKSFVYNQSGFKLIKTGKRLDLLHLSKIGDIPIRVHREVEGEIKQIIIKRHNSGKWFACLCVEREIAVKKAEHKRAVGIDVGIKHFLTDSDGRQIENPRFYQKTLDRIKILQHWLSRKKKGSRNREKMKVKLAKVYERLVNQRNDFLHKLSRFYVNNYDVICVEKLNIRNMVRNHNLAQRILDASWGKFIRLLHEKAERAACVVVDVPPRGTSEGLGYEDPYRDWISACRIKMRGWGSPDPPAEVEPLRELIQVPASFIFEAGSPLAFSRG

SEQ ID NO: 4132 - protein, 378 aa, unidentified
MSKGTSSPKAVRNYRFRIYPNREQEQKLLTWLETCRWIYNTALAQRKEAWEKEKRSVSRIEQQVWLKQAKKTDERIREVHSQAAQEVLFRVDRAFAAFFRRGKNGETPGYPRFKGRGRYKSLTYTQFGKGKGASFQDGKLKLSKIGLVKIKLHREIPGIIKTVIIKRDAAGKWWAVFAVEIELSRQQTHTGPAVGLDVGLEKFAALSDGSIIENPRHLRKTEERLKRAQRELSRKEKGSRNRERVRRKLAKLHAKVGNQRMDFLHKQSRKLVNTYSLIAVEELNIKGMVKNHHLAKSISDAGWGEFISMLEYKAGEAGTKLVKVNPSGTSQKCSRCGMTVPKELSERVHCCPYCGLTLDRDVNAARNILKRALALEAA

SEQ ID NO: 4133 - protein, 412 aa, unidentified
MISKAEKIKSTLQETKERRKTQRVVVYQLKLQNLSQHKEDLLSRAFAEAKWLYNWLVSDTERLSLAVNKIDVVEVKVGKTFEERVLTVLGSQVKQEIADRLRDNLRALGKLKKNGHKVGALKPKKFINSIPLKQYGATYKLDFARNRVRIQNLGTFRVLGLQQIPEKAEIANGVLVRKPSGYYLHVTCYIPREDSVRKHIGEAVGIDFGVNKKLTLSNGLQIRFELHETKRLKRLQRDISRCKNGSSNREKLRAKLRKEYEKINNRRKDVQNKVLAYLKQYKVVVYQDDFIKGWEALFGRQIHASGIGGLKSRLRNSLETPIEVARYERTTQECFQCGKVHRLSLSERMMECECGWKSDRDVNAALVILRKGLGLDPKQAVGLDRPELKPLERETAARILGSNPYICVSFTQ

SEQ ID NO: 4134 - protein, 412 aa, unidentified
MVSKAEKIKSTLQETKERRKTQRVVVYQLKLQNLSQHKEDLLSRALAEAKWLYNWLVSDTERLSLAVNKIDVVEIKVGKTFEERVLTVLGSQVKQEIADRLRDNLRALGKLKKNGHKVGALKPKAFINSIPLKQYGVTYKLDFTRNRVRIQNLGTFRVLGLQQIPEKAEIANGVLVRKPSGYYLHVTCYIPREDTMPKHIGEAIGIDFGVNKKLTLTNGLQIRFELHETERLKRLQRDISRCKEGSSNREKLRTKLRKEYEKINNRRKDVQNKVLAYLKQYKAVVYQDDFIKGWEALFGRQIHASGIGGLKSRLRNSLETPIEVARYERTTQECFQCGKVHKLSLSERMIECECGWKSDRDVNAALVILKKGLGLDPKQAVGLDRPELKPLERETAARILGSNPYICVSFTQ

SEQ ID NO: 4135 - protein, 391 aa, unidentified
MLNRGYKFRLYATPEQEVLFGQFAGVCRLVYNLALEQRRDWWRQFKANTGRSISYPSQARELTQLRAEFDWVAAVAQCCQQQALRDLDRAFAGFFSGRSGYPTARKRGKDDRFRFIGRECPWRKINAKWAVVRLPKIGEVKLRLTRDIPGTIKNVTVTSDALGWHVVFSTEVEHDAPQNFGPSVGIDRGVVHTLALSDGRFVDMPKERLNVLDRRARKQARKLSKCKRGSNRRAAARKALARTKAKMARVRLHWNHERTTEIARTYGVVVLEALKTRDMTASATGTAENPGRNVRQKAGLNRAILGNAWHQFETLLSYKIAERGGELRRVNPAYTSQCCAECGTIDKASRESQATFRCGHCGHTANADTNAARNILRAGTQPAPRYSFGGR

SEQ ID NO: 4136 - protein, 402 aa, unidentified
MSVTHRGYKFRLYATDEQEALFGQYAGVCRLVYNLALEQRRDWWRQFKTSTGRSISYPSQARELTVLRAEFEWIAAVSIIPQQQALRDLDSAFGSFFAGRADYPTPRKRGENDAFRFSGRNCQWRKLNAKWGVVRLPKIGEVKFRLTSDIPGAVKNVTVKRDALGWHVVFSTEVEHEAPQNFGPAVGIDRGVIHTLALSDGRFMDMPRERLNVLDRRARKQARKLAKCKRGSNRRNAAKKLLARTKAKMARVRLHWSHERTTEIASTHGVVVIEALKTRNMTASAAGTAKAPGRSVRQKAGLNRAILNNAWFQFEALLAYKLAERGGELRKVNPAFTSQTCSCCGAIDKASRESQATFRCGHCGHAANADTNAARNILRAGTQPAPRFSIGKPLKRELKRAA

SEQ ID NO: 4137 - protein, 404 aa, unidentified
MNRRAEDVGRARYTYRLRVSSTARAGLDAEWARCRWVWNECVAMSRKVHGLNKDVADKVTCGPAQLDRMLTEARTAMGWLREGSSVPQQQIIRDFGTSRAKALKDIKAGLPMRQRAGMPRIKRKRDALPSMNYTRRGFRLKDGRLHLAGGIVLTVVWSRGLPTDPTSVRVYRDSLGHWYASFVVATAIEPLPATGRAIGIDWGVKETATTTSDAHDLPHAQHGKTAAQKLARYQKQMARRKPARGKAASKGYRAASRAAAKVHKKVARQRQDTGRKWAKAVVRDFDQLAVEDFKPKFLAKSTMARKAADAAIGATRTALTEMARKHGRIVHLVHPAHTTMDCSECGARTKHALPLSERTYACTTCGAVSPRDKNSARVMLVRAGLTPAGTDGGRPSGAPLPKAA

SEQ ID NO: 4138 - protein, 400 aa, unidentified
MQNRGYKFRLYATAEQETMFGQYAGVCRLVYNLGLEQRRDWWRQFKANTGIAISYPSQARELTALRAEFDWIAAVSIICQQQALRDLDKAFGNFFAGRADYPTPRKRGMNDAFRFSGRDCQWRKLNAKWAVVKLPKIGEVKFRLTRDIPGTVKNVTVTSDALGWHVVFSTEVEHTAPPNFGPAIGIDRGLVHTIALSDGTFRDMPKEQLNLLDRRARKQARKLARCKRGSNRRHAARKILARTKAKIARIRLHWNHERTTEIAAMHSVVVLEALKTKSMTASAAGTFDEPGRKVRQKAGLNRAILNNAWHQFETLLSYKIAERGGELRKVNPAYTSQCCAECGTIDKASRESQATFRCGHCGHTAHADTNAARNNLRAGTQPAPRSSVRKPLKRELKRAT

SEQ ID NO: 4139 - protein, 388 aa, unidentified
MSSLKTYKYRLYPTKKQAITLQGVLDRLRELYNAALQERRDCYRYTGKGTSYTQQAAQLSEIKELRPEYQQIHSQVLQDTLRRVDKAFQAFFRRVKEGETPGYPRYQGKNRFDSFTYPQSGFSVTHDNRLCLSKIGTIKLKLHRPIEGKGKTCTLKREGDHWYCCFVCEVETIPRTPSPDEEVGVDLGVSKLATLSTGDVIEHPRFYRQAQKKLAKAQQALSRKKKGSHRRKKAVKRVARLHRKVRHQRNDYLHKWSRWLVNTYQTIVFEELAPATLSKRPKVKQDAETGQYLPNGASAKAGLNKSILDAGWRQFVTFCQYKAAWAGTVQIVMVDPKYTSQTCSGCGAVKKKELSERWHACECGCSLDRDHNAAINILRLGRSRQANT

SEQ ID NO: 4140 - protein, 493 aa, unidentified
MHEQVDVIVLAVALDQFRLEIPTDFGEDVTKVADSGFRQHIAAVFCNEDQVDMQHVNNVSSSSIIHIFQPWTHCYTGTMIQRGYRYKLKPTPAQERLFAQCAGVCRLIYNLALEQRRDHWRSFKRQTGSSISYPSQARELTELRAEYDWIANVSQTCQQQALRDLDRAYQNWFKGIASYPSPRKKGRNDTFRFQGREVRVRKLNGTWSDVRLPKIGWVRFRDTRPLRGKVNNATISLAPNGWHVSFTLAIEHEAPVNIAPAVGVDRGVANTLALSTGERMSVPASIAALERRQRRAQRELSRRKRGSKRYAKARARVSALSARRARIRKDWHHRVSLELARRFGTVVLEDLNTKGMTASARGTIDEPGRNVRQKAGLNRAILNQGWHIFEALLSYKLKERGGELRKVPARHTSQTCSACGAVDSRSRKNQAHFVCTSCGHFENADTNAAKVILRRNTAPMLVEEGHRISVEARTIGEAKSQTGNLRPSGRGRC

SEQ ID NO: 4141 - protein, 359 aa, unidentified
MLISYKYRLYPNREQRKTIDFTTERCRLLYNRLLDERIHAYREEGKSLTYYDQANTFSERKAAIPALKQVHSQLLQDVAKRIDKAFQAFFRRVKAGEKPGFPRFKPATQYNSFTYPQGGYKLELNKLTLSKIGDVKIKLHRPVEGKIKTCTIIQKNGNYYACLSAEVEPKQLPQCTDAVGVDLGVKMLAVTSDGEYFESPAYLRKSEKRLKRLQRSVSRKKKGGNRRKKAIRVLARLHEHVANQRKDYAHKVSRQFVNRYGLIAFEDLNVLGMVKNHHLAKSIIDSGWSQLVAFTSYKAESAGRVVKQVDPRHTSQLCSNCGQIVNKQLKDREHHCPYCGFVADRDENAAVNILKRATA

SEQ ID NO: 4142 - protein, 359 aa, unidentified
MLKAYKYRLYPNREQRKAIAFTLERCHLLYNRLLGERIHAYKSEGKNVTYYDQANTLSERKRHIPTLKHVHSQVLQDVVRRLDKAFQAFFRRVKRGETPGFPRFKSATQYDSFTYPQGGYTISGNKIKLSKIGEVKIKLHRPIEGKIKTCTIIQKNSKCYVCLSCEVDSVPLPDSAERVGVDLGVKTLAVTSDGEYFESPTYLRKSEKRLKRLQRSVSRKKKGSSRRKKAVCVLARLHERVANQRKDYAHKVSRRLVNRYGLIAFEELNVIGMIKNHKLAKSIADSGWSQLVTFTTYKAESAGRVVKQVDPRNTTQLCSNCSEIVKKALSVRVHRCKNCGFVADRDENAAKNILQRAIA

SEQ ID NO: 4143 - protein, 419 aa, unidentified
MHYAYRFRLKPTAEQRELLDYHRDTCRQLYNHALTEFTEIPESAGTLNQRVRQVRDQLTDLKDWWDELNDLYSTVAQAAVMRIEGSIKALSKLKEKGYNVGRLNWKAPRDFRSFTYVQSGFEFDKKNGQTVLSLSKLADIPIEWHRDIPDAENVKEVTLKKEPTGEWYASFAVDDKEEPPKPSLSDIDADDMVGIDVGILKYAHDTDSTAVGSLDLSEDRDRLEREQRNLSRKEHGSNNWEKQRQTVAECHQQIKRKRRDFLHKLSNYYAREYELVAVEDLNVKGMLESPGNSRNTASSAWNTFTDLLEYKCEREGTQFVEVDPDGTTKECAQCGVETDKPLWVREHSCPACGFEVDRDANAAWNILSRGLTDLGVGHSEETPVETALPVDTVVVSVKRVIESGSPCLKEPPKAASRQG

SEQ ID NO: 4144 - protein, 412 aa, unidentified
MYYAYKYRLKPSDAHREELDRCRDICRQVYNHALYRFNQIPEDAGTLNQRVRSIRDELPSLKDWWDGLTDVYSTVLQTAVMRIEDNIKSLGELKKNGYGVGQLKWKPPREFRSFTYSQSGFKLDKKGGQTVLSLSKLADIPIRLHRDIPDDAKLKQVTLKKEPTGEWFATFGVEVDRKTSEKPDILTDVVGIDVGILKYAHDTDGTAVESLDLSDERERLEREQRKLSRKQHGSNNYEKQRRRVAGCHADLRRKRRDFLHKLSNYYAKEYDFVAVEDLNVAGMMQFDSNSRNRASAAWRTFLRMLEYKCEHEGTHYIPVNPRGTSKECAACGVSSDKPLWVREHSCPSCGFTADRDWNAAYNILVRGLKKADIGAGCSESTPVETALPTGTAVVPAKRVVETGSPVLNARSA

SEQ ID NO: 4145 - protein, 386 aa, unidentified
MTIKTQVVKLKVNETMQKHLDVLCDYRRYCWNKGLETWQLMYEAHTLNKKDNPSPNERRVRDELVANKADWQYDLSARCLQLAVKDLANAWKNFFDKTQPDWGIPSFKSKKAPRQGFKTDRAKIVNGKLRLDRPRSISKKDWFDLKSYEALKMNEVKVVSIFKEKDSYYAALPYEEEISSKAKTHQKTAVDVNVGHFNYTDGKIDVLPAKLQKLYKRIKHYQRMLARKREVNSKLATKSNNYFVVRTKLQRDYCKVANIQNDLLQKFTTKLVDNYDQIVIEDLAVKEMMMTHVASKGMQRSLFSKFRQILTYKCDWYGKELILADKRYPSTQRCVQCGYVKKGDEKITLQGNKKYGTKHNEYICYQCDYSNDRDENAVLNLLALAK

SEQ ID NO: 4146 - protein, 368 aa, unidentified
MLRAYKTEIRPTEEQIILIHKTIGTCRYVYNLYLQKNKEAHEATSSFLSGYDFSKWLNNEHATQDEFAWIKEVPSKAVKQAIMNADAAYKRFFKKLSSSPRSKRKSDYGSFYLVGTIHVKRHLIQLPKLGKVKLKEKGYIPFDGVKSATVSREGNRYFVSVLVEEPSRVVRKHGQTDGIGIDMGIKELLFDSDGNTVANINRSNQIIKLTRILKRQQRKLSRRVKGSENFKKQKVIVQRLHRRIKNLKTDLKRKTVLEIVKRNPQFVTIEHLDVKGMMKNRKLSNAFQQIGIGHFVDWLKVKCLEYEIGLRQVDRFYPSSQMCSSCGSRKKMPLHVRTYDCDDCGNSLDRDLNAAINLKNSKEYTVLV

SEQ ID NO: 4147 - protein, 432 aa, unidentified
MAEQVKEAPAELIPTRVYELRPNKTMRKVLDEACDYRRYCWNQGLALWNEMYKARQTLKSSLASDSKKLTEEQKVLLKEKPSPSERRVRNMLVADKKDWQYTQSARILQLAISDLGKAWNNFFDKAQPGWGKPKFRSKREARQGFKSDQSKIKDGILYLERAKESSVPKDQWRGFKLSEKPLSDEFGVVSYFKEKGRYYVAIPYKIKAEDIKLPDKTGKATAVDVNVGHFDYTGGRMNVLPKKLDKIYGKIKHYQRQLAKKQVKNGEAACESENYLKTKAKLQACYRKASNIQNDLMQKFTTELVNNYDKIVIENLSVKGMLMSHVASKGVHRSMFGKFKQFLTYKCDWYGKELILANKLYPSTQRCAACGNVKKGDDKITLYGNKKHSTKHNEYVCYNQKCPNYNKVVDRDKNAMLSLLALTEHPELNHAL

SEQ ID NO: 4148 - protein, 432 aa, unidentified
MAEQIEEVPAELIQTRVYELHPNKTMRKVLDEACDYRRYCWNQGLALWNEMYKARKAIKSSLASDPKKLTEEQKVLLKEKPSPSERRVRNMLVADKKDWQYTQSARILQLAISDLGKAWNNFFDKAQPGWGKPKFRSKREARQGFKSDRSKIKDGILYLERARRSSVPKDQWCGFKLSEKPLSDEFGVVSYFKEKGRYYVAIPYKIKAEDVKLPDKTGKATAVDVNVGHFDYTGGRVNVLPKRLDRIYKKIKHYQRQLAKKRVKNGEAACESINYLKTKAKLQACYRKAGNIQNDLMHKFTTELINDYDKIVIENLSVKGMLMSHVASKGVHRSMFGKFKQILTYKCDWYGKDLILANKLYPSTQRCAACGNVKKGDDKITLYGNKKHGTKHNEYICYNKKCPNYNKVVDRDKNAMLSLLALTEYPELNHAL

SEQ ID NO: 4149 - protein, 432 aa, unidentified
MAEQIEEVPAELIQTRVYELHPNKTMRRVLDEACDYRRYCWNQGLALWNEMYKARQTLKSSLSTDSKKLTEEQKVLLKDKPSPSERRVRNMLVADKKDWQYAQSARILQLAISDLGKAWNNFFDKAQPGWGKPKFRSKREARQGFKSDQSKIKDGILYLERAKESSVPKDQWRGFKLSEKPLSDEFGVVSYFKEKGRYYVAIPYKIKAKDIKLPDKTGKATAVDVNVGHFDYTGGRINVLPKKLDKIYGKIKHYQRQLAKKQVKNGEAACESENYLKTKAKLQACYRKANNIQNDLMQKFTTELVNNYDKIVIENLSVKGMLMSHVASKGVHRSMFGKFKQFLTYKCDWYGKELILANKQYPSTQRCAACGNVKKGDDKITLYGNKKHGTKHNEYVCYNQKCPNYNKVVDRDKNAMLSLLALTEHPELNHAL

SEQ ID NO: 4150 - protein, 414 aa, unidentified
MYYAYKYRLKPSDAHRKELDRHRDICRQLYNHALYRFDQIPEDAGTLNQRVRSIRDKIPSLKDWWDGLSDVYSTVLQTAVMRIEQNVKSLGGLKENGYGVGQLTWKPPREFRSFTYSQSGFKLDKKGGQTILSLSKIADIPIRLHRPIPDDATLKQVTLKKEPTGEWFVTFGVELDREPPEPSATPEKCVGIDVGILKYAHDTDGTAVGPLDLSDERDRLEREQRKLSRKQHGSNNYKKQRRRVAECHADLRRKRRDFLHKLSNYYAREYDLVAVEDLNVKGMMESPSNSRNTASSAWRTFLSLLEYKCEREGTHFVGVNPRGTTTECAACGVSTEKPLWVREHSCPSCGFEADRDANAAWNILSRGLENIGVGYSESTPVETALPVDTPVSAKRVVETGSPTLKERAASAVSD

SEQ ID NO: 4151 - protein, 391 aa, unidentified
MVRLLKSYKTEIKPTLEQIQMINKTIGTCRFVYNFFLAHNKEVYEKEKKFVSGMDFSKWLNNIYIKENPEYSWIKEVSSKSVKQSIMNADRAFKRFFKGQSRFPNFKKKGKSDVKMYFVKTDAKVIIPCERHRIKIPTIGWVRIKEKGYIPTNPSTHIIKSGTVSCKAGRYYVSVLIEEQENPQSELNDFGIGIDLGVKDFAITSNGITKKNINKSSRLKKLEKQLKREQRCLSRKYEDYKKRSKKGEATRQNIQKQIAKVQKLHQRINTIRTDYINKSVNEIVKTKPSYITIEDLNVSGMMKNRHLSKAVASQKFYEFRTKLEAKCKETGIELRVVDRWYPSSKLCHECGCIKKDLKLSDREYICECGYRADRDYNASLNLRDAITYKIA

SEQ ID NO: 4152 - protein, 369 aa, unidentified
MLRAYKVEIQPNQEQIKTINKTIGTCRWVYNKFVEINQIRYKNKLKYMSGYDFSKWLNNYFIPNNPDKLWIKESASKAIKQSIMNAHRAYQDAFKKQKGFPKFKKKQSNGSYYLIGTIHVERHRIRLPNLKWVKLKEKGYIPNKNTKSVTVSKEFDRYYISILVDEEPKTIFKSLQTEGIGIDLGLKDTLFTPEGVKITDLRKNKKLVKLNKSLKRQQRKLSRKQKKSNNWFKQLLKVQRLYRKISNLKKDIKRKSILSIIKENPQYITIENLNIKGMMKNRRLSNAFQQIGLGYIVEWFKWKCYEYGIELRQVDRFYPSSQICNQCGNRQKMPLNKRVYKCENCGTIEDRDINASINLKQAKEYTVLV

SEQ ID NO: 4153 - protein, 432 aa, unidentified
MAEQVKEAPAELIQTRVYELRPNKTMRKVLDEACDYRRYCWNQGLALWNEMYKARQTLKSSLSTDSKKLTEEQKVLLKDKPSPSERRVRNMLVADKKDWQYTQSARILQLAISDLGKAWNNFFDKAQPGWGKPKFRSKREARQGFKSDQSKIKDGILYLERAKESSVPKDQWRGFKLSEKPLSDEFGVVSYFKEKGRYYVAIPYKIKAEDIKLPDKTGKATAVDVNVGHFDYTGGRMNVLPKKLDKIYGKIKHYQRQLAKKQVKNGEAACESENYLKTKAKLQACYRKASNIQNDLMQKFTTELVNNYDKIVIENLSVKGMLMSHVASKGVHRSMFGKFKQFLTYKCDWYGKELILANNLYPSTQRCAACGNVKKGDDKITLYGNKKHGTKHNEYVCYNQKCPNYNKVVDRDKNAMLSLLALTEHPELNHAL

SEQ ID NO: 4154 - protein, 432 aa, unidentified
MAEQIEEVPVELIQTRVYELHPNKTMRRVLDEACDYRRYCWNQGLALWNEMYKARQALKSSLASDSKRLTEEQKVLLKEKPSPSERRVRNMLVADKKDWQYAQSARILQLAISDLGKAWNNFFDKAQPSWGKPKFRSKREARQGFKSDRSKIKEGILYLERARGSSVPKDQWRGFKLSEKPLSDEFGVVSYFKEKGRYYVAIPYKIKVEDVKQPDKTGKATAVDVNVGHFDYTGGRVNVLPKKLDRTYKKIKHYQRQLAKKRVQNGEAACESKNYLKTKAKLQAYYRKASNVQNDLMQKFTTELVKDYDKIVIENLSVKGMLMSHVASKGVHRSMFGKFKQILTYKCDWYGKDLILANKLYPSTQRCAACGNVKKGDDKITLYGNKKHGTKHNEYVCYNEKCPNYNKVVDRDKNAMLSLLALTEYPELNHAL

SEQ ID NO: 4155 - protein, 419 aa, unidentified
MHYAYRFRLDPTPSQRERLDYHRDTCRQLYNHALTEFNEIPESAGTLNQRVRQVRDQLPDLKEWWDDLTDLYSTVAQATVMRIEDSVKALSELKQQGYKVGSLNWKAPQEFRSFTYVQSGFEFDSKDGHTVLSLTKLADIPVVKHREIPDSETIKEVTIKKEPTGEWVACVTVDGKETPEKPERPERCVGIDVGILKYAHDTDGRAIGSLDLADERERLQREQRKLSRKDHGSNNWEQQRQKVAQCHQQLKRKRRDFLHKLSNYYATEYDLVAVEDLHIKSMLESAGNSRNTASAAWNTFTTMLSYKCDREGTHFVEVDPAGTTKECASCGVATDKPLWVRKHSCPACGFEMDRDANAAINILSRGFDKLGVVHSEGTTPVETALPMFASDSVSGVDTKRVIETGSPTLKDRPAQAVSE

SEQ ID NO: 4156 - protein, 250 aa, unidentified
MIKTQVVKLKVNKTMQKHLDALCDYRRYCWNKGLETWQLMYEAHTLNKKDNPSPNERRVRDELVANKADWQYDLSARCLQLAIKDLANAWKNFFDKAQPDWGIPSFKSKKAPRQGFKTDRAKIVNGRLRLDRPRSISKADWFDLKSYEALKMNEVKVISIFKEKDSYYAALPYEEEISSKAKNHQKTAVDVNVGHFNYTDGKINVLPAKLQKLYKRIKHYQRMLARKREVNGKLATKSNNYFAVRTKLQR

SEQ ID NO: 4157 - protein, 387 aa, unidentified
MKKLLKSFKTEINPTPEQKIRIHKTIGTCRYVYNFYLCHNKALYDKGEKFMTGKGFSVWLNNEYIPNNPDKAWIKEVYSKAVKRSIEDGCTAFTRFFKHQSDFPKFKKKGKSDVKMYFVRNNPKDCVCERHKLKIPTLGWVRIKEKGYIPTTKDGYVIKSGTVSIKADRYYVSVLVELPDNKTADNSNEGIGIDLGLKDFATVSNGKTYKNINKSAKLKKLEKQLIREQRSLSRKYENLQKGESTQRANIQKQKLKVQKLHHRIDNIRTDYINKTIAEIVKTKPSYITIEDLNVKGMMKNRHLSKAVASQKFYEFRIKLQAKCNENGIELRVADRWYPSSKTCHCCKNIRKDLKLSDRIFKCDCGYIEDRDFNAALNLRDAMTYEVA

SEQ ID NO: 4158 - protein, 409 aa, unidentified
MRLADIPSVVSQTMCLPLTWKRDKSLIPDSPMRKSYKFKLQNQSNTIKIGNMIDDMWAIHLHIMLLDRRYYRIYGKNMSISRLNRHVRELKKRTKPHWKDLPSQAVQDVVLRYGKSRNAFFDNIKDRKAGKTTRKVGFPKIKTRHKYTSLTFTQAGYTLDNNRIKINCIDTWFSIHKHREIQGIIKTITIKRDRCGDYWICFSCDNVDDSEPKSMTGESAGFDYGNKTFLTSDTRHKIESPEFLKQSLKVLRSLSKALSRKVKGSGNWYRACRALARQHRKVARQRYDWQWKLSTELCTEFDILIFETLNLEGMKRLWGRKVSDHAFYQFLQLLEQKCAKHGKKFQKISQWTPTTKPCSDCGYHNKALTLSDRQWTCPRCGSHHDRDVNAAINIKRAGLAALSGADVRR

SEQ ID NO: 4159 - protein, 370 aa, unidentified
MRKSYKFKLQNQSNTINIGNMIDDMWQIHVHIMLLSRRYYRIYGKNLSASRLNKHIRKLKKTTKPHWADLPSQVVQDVVLRYGKSQDAFFDNIKDRKAGLTTRKVGRPKIKPRQKYSSLTFTQAGYTLEDNRIKINCIDTYFSFHKHREIKGVIKTITIKRDRCGDYWICFSCENVEDSEPKPKTGKSAGFDYGNKTFLTSDEGNKIESPQFFKQSLKKLRSLSKALSRKVKGSGNWYRACRALARQHRKVARQRADWQWKLSTELCTEFDTLCFETLNLEGMKRLWGRKVSDHAFYQFLQILEQKCAKHGKKFQKISQWTATTKPCSDCGYHNKALSLSDRQWTCPECGSHHDRDVNAAINIKRAGLAA

SEQ ID NO: 4160 - protein, 370 aa, unidentified
MRKTYKYKLQHQSNTIKLGNLLDDMHRIHVHIMRLQKRYCRLFGKNISAYRMNAHIAKLKKRTKPHWKELPSQVIQDVVLRMGKAYDAFFRNIAARKAGKTTKKVGRPHIKPHHKYNSMTFTQAGYKLEGNRIKINCIDTWYSFHKHREIKGEIKTITIKRDMCGDYWICFSCENVHDSEPKAMTGKRAGFDFGLKTFLTSSDGDKIECPQFLKRSLNRLRSLNKSLSRKVLKSGNWYRAKRAVSRHYRKVARQRYDWHWKLATHLCRSYDTLIMETLNIDGMKRLWGRKVSDLAFYQFLQILQQKCVKHNKQFGQIELWTGTTKPCSECGERNEEITLADRRWRCSHCGIAHDRDINAAINIKQAGLAA

SEQ ID NO: 4161 - protein, 370 aa, unidentified
MKTEKYEFYHQSNLIQIGNLIDDLHSVHIHLLKLQRRYYRIYGKYASFGRICNHITKLKQRTKPHWADLPSQVIQQVAKRIHLGYKNFFDNIKERKAGLTNCKVGRPKIKPNHKYNSLTFTQSGFKIEGNRLYIGCLKKSFTFWKHRDWTGPVKTVTIKRDTVGDYYLYLTCEDCEPTEKLPLTGNVAGVDFGMKTFLTLSDGTTIASPEFYKQGLAAIRSANKALSRKQYLSSGWFRAKRHLARVHKKIADQRRDWFFKLALRLVRKYDSIAIETLNLEGMKRLWGRKISDVAFGEFSLILQWTYAKYGKTFLKAGHWTATTKPCHCCGHHNENLTLSDRQWTCLECGFPHDRDVNAAINILRVGVPWT

SEQ ID NO: 4162 - protein, 351 aa, unidentified
MIDDMWGIHLHIMLLARRYRRMFGKDISAYRLKRHIAKLKKRTKPQWADLPSQVVQDVVLRYGKSQDAFFQNKKDRKAGKTQRKVGRPKIKPRHKYNSMTFTQAGYTLEDNRIKINCIDTWFSFHKHREIEGIIKTITIKRDRCGDYWIYFSCENVDDSKPKSKTGKSAGFDYGNKTFLTSDAGEKIDSPQFLKQSLKTLRSLNKALSRKVKGSNNWYRAARALARLHRKIARQRTDWQWKLADELCTTFDTLCFETLNLDGMKRLWGRKVSDHAFYQFLQILEQKCAKHGKTFVQIGRWTATTKPCSNCGYHNKELSLSDRQWTCPDCGSHHDRDVNAAINIKRAGLETA

SEQ ID NO: 4163 - protein, 370 aa, unidentified
MRKSYGFKLQSQKNVIKLGNMIDDMWGIHLHIMLLARRYRRMFGKDVSAYKLNRHIAKLKKRTKPHWAELPSQVVPDVVLRYGKSQDAFFQNKKDRKAGLTTRKVGRPKIKPRHKYNSMTFTQAGYTLEDSRIKINCIGTWFSFHKHREIEGVIKTITIKRDSCGDYWIYFSCENVEDSEPKLKTGKSAGFDYGNKTFLTSDEGDKINSPQFFKQSLRTLQSLNKALSRKVKGSGNSYRATRALARHHRKVARQRYDWQWKLATELCTEFDTLCFETLNLDGMKRLWGRKVSDHAFYQFLQILEQKCAKHGKKLVKISQWTPTTKPCSECSYHNKNLSLSDRQWTCPECGSHHDRDVNAAINIKRAGLAA

SEQ ID NO: 4164 - protein, 369 aa, unidentified
MKTEKYEFYHQSNLIQIGNLIDDLHRVHVHLLKLQRRYYRIYGKYASFSRICGHITKLKERTKPHWNQLPSQVIQQVAKRIHLGYKSFFDNIKDRKAGITQRKVGRPKIKPNHKYNSLTFTQAGFKIEGNRLTINCIKKSFTFWKHRDWTGKIKTVTIKRDNVGDYYLYLSCEDCEPSEKLPLTGNVAGADFGCKTFLTLSDGTRIASPEFYKHGLKAIRSANKALSRKQKGSNAWYRAKRHLARVHKKIANKRRDYFFKLSLRLVRKYDTLAIETLNLEGMKRLWGRKISDIAFGEFALILQWTCAKHGKTFLKAGRWQATTKPCSVCGHHNENLTLEDRQWICPECGSHHDRDINAAINILQAGVPA

SEQ ID NO: 4165 - protein, 369 aa, unidentified
MKTYKYELSHQSNTIQLGNLLDDLHQVHVHVLRLQRRYYRLYGKYISASTMNAHIAKLKKRTKPHWKHLPSQVVQDVVLRIDKGYQKFFQNIKDRKSSKTTKKVGRPHIKPRHKFNSVTWTQAGYKIEGNRIYISCLKKWFTFWKHREWTGTIKTVTIKRDHVGDYSISFACADAEPIVPLPLTGNVAGIDFGLKTFLTLSDGTKIASPQFFKQGLNALRSAHKALSRKQFLSGGWFRAKRHLARSYKDIANRRRDWFWKTAKSLCEKYDTLVVETLNLDAMKRLWGRKVSDLAFGEFVLILKWQCHKYGKSLVQIDTWTPTTKVCHICSHQHTTLTLADRTWTCDCCHTHHDRDINAANVILKAGMPA

SEQ ID NO: 4166 - protein, 370 aa, unidentified
MKTYKYELYHQKNIIKIGNLIDDLHQVHVHLIRLQRRYYSMFGKYIPLKRMLKHITQLKRTTKPHWNQLPSQMIQDVAIRIDHGYQAFFDNIEDRKNGVTQRKVGRPKIKPNHKYKSITFTQAGYKIEDSRLTINCLDTTFTFWKHRKWTGKVKTVTIKRDNVGDYYIYFTCEDPKPVQKLPLTSNEAGVDFGSKTFLTLSDGIKILSPHFYKQCLNEIRSANKALSRKQYLSKGWFRAKRHLASVHKKIADKRRDWFFKLALRLVRRYDNIAIETLNLEAMKKLWGRKISDIAFGEFSLILKWTCAKYGKTLLKAGRWQPTTKPCSSCGFHNKDLTLNDRYWTCPSCKAEHDRDVNAAINILRVGVPWT

SEQ ID NO: 4167 - protein, 369 aa, unidentified
MKTYKYELSHQSNTIQLGNLLDDLHQVHVHVIRLQRRYYRLFGKYISASTMNAHIAKLKKRTKPHWKQLPSQVVQDVVLRIDKGYQKFFQNIKDRNSGKTTKKVGRPHIKPRHKFNSMTWTQAGYKIEGNRFYISCLKKWFTFWKHREWTGTIKTVTIKRDPVGDYSISLVCADAEPIVPLPLTGNVAGIDFGLKTFLTLSDGTRIASPQFFKQGLNALRSAHKALSRKQFLSGGWFHAKRHLARSYKDIANRRRDWFWKTAKSLCEKYDTLVVETLNLDAMKRLWGRKVSDLAFGEFVLILKWQCHKYGKSLVQIGTWTPTTKVCHICSHQHTTLTLADRTWTCDCCHTHHDRDINATNVILKAGMPA

SEQ ID NO: 4168 - protein, 370 aa, unidentified
MRKAHKFKLQNQSNTIKIGNMLDDMWEIHVHIMLLQRRYYRMFGKNLSASRLNAHVAKLKKRTKPHWADLPSQVVQDVVLRYGKAQDAFFENIKDRKAGLTTRKVGRPKIKPRHKYCSMTFTQAGYELKDNRIKINCIETWFSFHKHREIKGNIKTITIKRDKCGDYWICFSCENVDASEPKPKTGKSAGFDYGNKTFLTSDEGDKIQSPQFFKQSLRTLRSLSKSLSRKVKGSNNYYRACRALARQHRTVARQRADWQWKLATQLCSEYDILIFETLNLDGMKRLWGRKVSDHAFYQFIQILEQKCAKHGKKLKRINQWTATTKPCSDCGYHNKVLSLSDRQWTCPECGSYHDRDVNAAINIKRAGLAA

SEQ ID NO: 4169 - protein, 369 aa, unidentified
MKTEKYEFYHQSNVIQIGNLLDDLHSVHVHLLLLQRRYYLIYGKYASFARICRHITKLKARTKPHWNQLPSQVIQQVAKRIHLGYEKFFDYLKDKKRGKSVRKVGRPQIKPNHKYNSLTFTQAGFKIEGNRIYITCLKKSFTFWKHRDWTSTIKTVTIKRDTVGDYSLYITCEDCEPSEKRPLTGNVAGADFGMKTFLTLSDGTKIESPEFYKQGLNAIRSANKALSRKQKGSHAWYRAKRHLAGVHKEIASRRRDWFFKLALRLVRKYDTIAIETLNLEGMKKLWGRKISDLALGEFAMILQWTCAKYGKTFLTAGRWEATTKPCHRCGHHNENLSLDDRQWICSECDSHHDRDINAAINILQAGVPA

SEQ ID NO: 4170 - protein, 371 aa, unidentified
MRKVSFGFKLQSQKNIIKLGNMIDDMWGVHLHIMLLARRYRRMFGKDVSAYRLKRHVAKLKKRTKSHWKDLPSQVVQDVVLRYSKSQDAFFQNIKDRKAGLTTRKVGRPKIKPRHKYNSMTFTQAGYELEENRIKINCIETWFSFHKHREIEGLIKTITIKRDRCGDYWIYFSCENVDDSEPKPKTGKSAGFDYGNKTFLTSDEGNKIRSPQFLKQSLKTLRSLNKALSRKVKGSNNWYRACRALARLHQKIARQRLDWQWKLATELCTEFDTLCFETLNLDGMKRLWGRKVSDHAFYQFLRVMEQKCAKHGKKLKRIRQWTATTKPCSDCGYPNKELSLSDRQWTCPDCGSHHDRDVNAAINIKRAGLVA

SEQ ID NO: 4171 - protein, 370 aa, unidentified
MKTYKYEFSHQSNIIMLGNLIDDLHDVHVHLLKLQRRYYRIYGKYISLSCILKHITKLKRTTKPHWNQLPSQMIQDVAIRIDLGYQAFFDNIADRKQGKTQRKVGRPQIKPNHKYNSVTFTQAGFKIEGNRLTINCIKKSFTFWKHREWTGTIKKITIKRDNVGDSYLYLICENPEPSKKLSLTGSEAGVDFGSKTFLTLSDGIKIESPQFYKQGLNAVGSANKALSRKKYLSNGWYRAKRHLSGVHKDIVNRRRDWFFKLALRLVRKYDKIAIETLNLEGMKRLWGRKISDLAFGEFALILRWTCAKYGKTLLKAGRWTPTTKPCSECGQKNENLTLSDRQWTCPECGSHHDRDINAAINILRVGVPWA

SEQ ID NO: 4172 - protein, 370 aa, unidentified
MRKSYKFKLQNQSNTIKIGNMIDDLWQIHVHILLLARRYYRIFGKNISMYRLKAHLRKLKKTTKPHWADLPSQVVQDVVLRYGKSQDAFFENIEDRKAGKTTRKVGRPKIKPRQKYSSMTFTQAGYTLEGNRIKINCIGTWFSFHKHREIKGNIKTITIKRDKCGDYWICFSCENVKDSEPKLKTGKSAGFDYGNKTFLTSDEGKKIESPQFFKQSLNTLRSLSKALSRKVKGSNNWYRACRALARQHRKVARQRADWQWKLADKFCSEFDILIFETLNLDGMKRLWGRKVSDHAFSQFLQILEQKCAKHGKKFQKISQWTATTKPCSDCGYKNENLSLSDRQWACPECGSHHDRDINAAINIKRAGLAA

SEQ ID NO: 4173 - protein, 350 aa, unidentified
MLDDMWDIHIHIMLLSRRYYRMFGKNLSAYRINAHIANLKKRTKPHWKDLPSQVVQDVVLRYGKAQDAFFENIKDRKAGLTRRKVGRPKIKPRHKYSSMTFTQAGYELKDNRIKINCIDTWFSFHKHREIKGTIKTITIKRDKCGDYWICFSCENVEASEPKPKTGKSAGFDYGNKTFLTSDEGHKIESPEFFKESLNTLRSLSKSLSRKVKGSNNWYRACRTLARQHRKVARQREDWQWKLANELCTEFDTLYFETLNLDGMKRLWGRKVSDHAFYQFLQILEQKCAKHGKRLEKISQWTATTKPCSDCEYPNKDLSLSDRQWTCPECGSHHDRDVNAAMNIKRAGLAA

SEQ ID NO: 4174 - protein, 284 aa, unidentified
MKTYKYKIYNQSNLIRLGNLLDDMWQVHVYFHKWQRQRYKDGLPYANYNAMSAHLTALKRTTHPHWKALPSQAMQEELRRIDAAYVRFFKKLGGRPHIKPRHKFKSFTLKQAGWSLKDNRLTLNFRKWDKEKWRHNKVPYTFHKHREFHGNIRHITIKRDACGDYWLCITTDFQDTEPLPTTGENVGVDFGMKDAYLTLSTGEKIQHPQPLKQSLNKLRTLNKSLSRKKKGSGGWWRCVRQLARLYRKVANQRLDFQWKLADTLCKRFDTIVVETLNLDGMKRL

SEQ ID NO: 4175 - protein, 369 aa, unidentified
MRTYTYKIGKQSNCVRLGNLLDDLWQVHEYFHKWQRQRYKDGLPYANHAAMCEHLTELKRTTHPHWKALPSQAMQEELKRIHLAYERFFKKLGGRPKIKKRHRFKSFTLKQAGWTLKDNRLTLNFRKWSKGKWRHDKVPYTFHKHRQWHGNISRITIKRDACGDYWLYLITDFVETKPLPTTGKSVGADFGMKDAYLTLSTGEKIQHPQPLKQSLTKLRTLNKSLSRKQKGSNGWWQCVRGLARLYRKVANHRKDFHWQLASKLCEKFDTIVLETLNLDGMKRLWGRKVSDLAFYQFVEILRYKCEKHKRHFVQIGQWTVTTKPCSDCGHSNENLSLSDRQWTCLECGSHHDRDINAAVNILRAGIAVI

SEQ ID NO: 4176 - protein, 431 aa, unidentified
MSQIPHTKAERIRTSLQATRERRKGQQAKVYQLKLQNLSEKQVADLDRAFLESKWLYNWLLEDTERRLEEDVGKVKEVPVKVGETFETRKLHLLGSQIKQEIRDRLKDSLRSLAQLKKRGHKVGRLRFKPFVNSIPLKQYGITYKVDFERNRVRIQKLGSFRVLGLHQIPTGAELASAVLVRRPSGYYLHLVAYVPKDEGSKGGDKEGVGELPPVGLDLGVKHQLTLSNGLRFEYGIPPSRRVRRLHRQLSRKEKGSKNYAHIRHLLRREYEKLNNRKRDIQNKLLAFLRRYPKVVLQDDQVKGWQEGLFGKKVHATAIGGLKGRLKASLPTLVALGPYETTSRECFRCGARLDLTLQDRYIRCTCGWEADRDHNAALVILRKGLGIPSEDALGLDRPEVTPLEMRAAVRIVGSNPYVRISSVVEGGSPPL

SEQ ID NO: 4177 - protein, 413 aa, unidentified
MRYTYRFRLDPTPEQRELLDHHRDTCRQLYNHALNEFEKIPESAGTLTQRVRQVRDQLTDLKVWWDGLNDLYSTVAQAAVMRIEDSIKALSQLKQNGYNVGSLNWKAPKDFRSFTYVQSGFEFDSKNGQTVLSLSKLADVPLIKHRTIPDTETIKQVTIKKEPTGDWFASFVVDGKETPEKPTDPDRCVGIDVGILKYAHDTDGYAIESPDFSDERERLERAQRDLSRKEHGSTNWETQRQIVAERHADLKRKRRDFLHKLSNYYATEYDLVAVEDLDVKGLVELRKNSRNRAGAAWGTFLRMLEYKCEREGTHFVAVNPRGTTKECASCGVKTEKPLWMREHSCPACGFEADRDANAAWNILSRGLEDVGVGYSESTPVETALPVDTPVSAKRVVETGSPTLKERTASAVSE

SEQ ID NO: 4178 - protein, 413 aa, unidentified
MRYTYRFRLDPTPEQRELLDQHRDTCRQLYNHALNELEKIPESAGTLNQRVRQVRDQLTDLKVWWDELNDLYSTVAQAAVMRIEDSIKALSQLKQNGYNVGSLNWKAPKDFRSFTYVQSGFEFDSKNGQTVLSLSKLADVPLIKHRTIPDTETIKQVTIKKEPTGDWFASFVVDGKETPEKPTDPDRCVGIDVGILKYANDTDGYAIESPDFSDERERLERAQRDLSRKEHGSTNWETQRQIVAERHADLKRKRRDFLHKLSNYYATEYDLVAVEDLDVKELVELPRNSRNRAGAAWGTFLRTLEYKCEREGTHFVAVNPRGTTKECASCGVKTEKPLWMREHSCPACGFEADRDVNAAWNILSRGLEEVGVGYSESTPVETALPVDTPVSTKRVVETGSPTLKERTASAVSE

SEQ ID NO: 4179 - protein, 420 aa, unidentified
MNYNYRYRLKPTEDQRETLDYHRDICRQLYNHALYRFNQIPEDEGTVKQRVRKIRDELPDLKDWWDALTDVYSKVLQPTVMRVAKNVKALGNLKEQGYKVGELRWKSPREFRSFTYNQSGFELNRKSGQTVLSLSKLAAIPIEFHRPLPDDATVKEVTLKKEKTGEWFAIFGIEMDTEPPAKPPLEDIDTDEMVGIDVGILKYAHDTDGTAVESLDLSEERDRLEWEQRKLSRKERGSNNWENQRRRVAECHLAIKRKRNDFLHKLSNYYAREYELVAVEDLDVKEMLESPRNSRNTASAAWTTFTDMLETKCEREGTHFVEVDPDGTTKECAQCGVETDKPLWVREHSCPACGFEADRDANAAWNILSRGLTELGVGHSEETPVETALPAGTTPVPVKRVVEAGSPCLKEPPKAASRQG

SEQ ID NO: 4180 - protein, 409 aa, unidentified
MTTQRKTGDAGHARYTYRLRVSSTAHAALLAEWDRCRWIWNECVAKSKAAHAWNHNRPVGEDKRTCGPAQLDKMLTEARERTPWLREGSSVPQQQIIRDFGKSRAKAQKDIEERLPLKRRAGMPGWKKKREADPTLNYTKRGFRLKSGRLYLAGGIALTVAWSRALPAAPSSVRVYRDSLGHWYASFVVPAEVQPLPTTGAVIGVDWGVKETATTTSDEYDLPHAEHGRKAAAKLSRYDRMMARRKPAKGQAASKGHREAKKLRAKAYKKVARKRQDTGRKWAKRVVTDHDAIAVEDFHPKFLAKTSMARKAADAAIGATKKALIEMGRKHGRDIRLVHPAHTTMECASCGARTKHALPLSERTYTCTACGAVSPRDKNSARVMLVRAGLNPAGVEGVRPPGAPLQEAA

SEQ ID NO: 4181 - protein, 369 aa, unidentified
MLRAYKTEINPSFEQRQTINQTIGTCRWVYNKFIETNQNFHKTGQSYMNGFAFSKWMNNVYLPNNPNKHWIKQSASKAVKQSIMNAHRAYQTFFKNKQGCPKFKKKSGIGSYYLIGTIHIQRHRIQLPKLGWIKLKERGYIPTNNIKSATVIREFDRYYVSVLIDCECPLLSKPEQTEGIGIDLGLKEAVFTPSGVKIRSFKTNQTIIKLDKSLKRQQRKLSRKKKGSHNWYKQLLKVQRLYKRIKNIKKDIKRKGILSILRTNPQFITVENLNIKGMMRNKRLANSFQQIGLGYMVEWLKIKCRDYGIELRQVDRFYPSSQICSDCGHIQPMPLNQRTYHCNHCGMIKDRDINASINLKQATDYTVIV

SEQ ID NO: 4182 - protein, 420 aa, unidentified
MNYNYRYRLKPTENQRETLDYHRDTCRQLYNHALYRLNQIPESEGTVKQRVRTIRDELPDLKDWWDALTDIYSKVLQPTVMRIAKNITALGQLKKQGYKIGELRWKSPREFRSFTYNQSGFVLDKKSGQTVLSLSKLADIPIEVHRPLPENATVKEVTLKKEKTSEWFAIFGIEMDTEPPAKPSLEDVDTDDMVGIDVGILKYAHDTDGTAVGSPDLSEERDRLEREQRNLSRKEHGSNNWEKQRRRVAECHQQIKRTRRDFLHKLSNYYAREYDLVAVEALNVKGMLESPGNSRNTASAAWNTFTDLLGYKCKRGGTHFVEVDPEDTTKECASCGVKTDKPLWVREHSCPSCGFKTDRDANAAWNILSRGLTDLGVGHSEGTPVETALPTGTAVVPAKRVVEAGSPCLKEPSTAASRQG

SEQ ID NO: 4183 - protein, 432 aa, unidentified
MAEQIEEVPAELIQTRVYELHPNKTMRKVLDEACDYRRYCWNQGLALWNEMYKARKAIKSSLASDPKKLTEEQKVLLKEKPSPSERRVRNMLVADKKDWQYTQSARILQLAISDLGKAWNNFFDKAQPGWGKPKFRSKREARQGFKSDRSKIKDGILYLERARRSSVPKDQWCGFKLSEKPLSYKFGVVSYFKEKGRYYVAIPYKIKAEDVKLPDKTGKATAVDVNVGHFDYTGGRVNVLPKRLDRIYKKIKHYQRQLVKKQVKNGEAACESENYLKTKAKLQACYRKASNIQNDLMQKFTTELVNNYDKIVIENLSVKGMLMSHVASKGVHRSMFGKFKQFLTYKCDLYGKELILANKQYPSTQRYAACGNVKKGDDKITLYGNKKHGTKHNEYVCYNQKCPNYNKVVDRDKNAMLSLLALTEHPELNHAL

SEQ ID NO: 4184 - protein, 432 aa, unidentified
MAEQIEEVPAELIQTRVYELHPNKTMRRVLDEACDYRRYCWNQGLALWNEMYKARQTLKSSLSTDSKKLTEEQKVLLKDKPSPSERRVRNMLVADKKDWQYAQSARILQLAISYLGKAWNNFFDKAQPGWGKPKFRSKREARQGFKSDQSKIKDGILYLERAKESSVPKDQWRGFKLSEKPLSDEFGVVSYFKEKGRYYVAIPYKIKAKDIKLPDKTGKATAVDVNVGHFDYTGGRINVLPKKLDKIYGKIKHYQRQLVKKQVKNGEAACESENYLKTKAKLQACYRKASNIQNDLMQKFTTELVNNYDKIVIENLSVKGMLMSHVASKGVHRSMFGKFKQFLTYKCDLYGKELILANKQYPSTQRYAACGNVKKGDDKITLYGNKKHGTKHNEYVCYNQKCPNYNKVVDRDKNAMLSLLALTEHPELNHAL

SEQ ID NO: 4185 - protein, 432 aa, unidentified
MAEQIEEVPAELIQTRVYELHPNKTMRKVLDEACDYRRYCWNQGLALWNEMYKARKAIKSSLASDPKKLTEEQKVLLKEKPSTSERRVRNMLVADKKDWQYTQSARILQLAISDLGKAWNNFFDKAQPGWGKPKFRSKREARQGFKSDRSKIKDGILYLERARRSSVPKDQWCGFKLSEKPLSYKFGVVSYFKEKGRYYVAIPYKIKAEDVKLPDKTGKATAVDVNVGHFDYTGGRVNVLPKRLDRIYKKIKHYQRQLVKKQVKNGEAACESENYLKTKAKLQACYRKASNIQNDLMQKFTTELVNNYDKIVIENLSVKGMLMSHVASKGVHRSMFGKFKQFLTYKCDLYGKELILANKQYPSTQRYAACGNVKKGDDKITLYGNKKHGTKHNEYVCYNQKCPNYNKVVDRDKNAMLSLLALTEHPELNHAL

SEQ ID NO: 4186 - protein, 367 aa, unidentified
MKSIRTKLKLNNKQKTMMAQHAGYSRWCYNWGLSLWNAAYKDGYKPNARKLREVFTNHTKPLYPWMKNLSSRVYQYAFIHLGEAFKRFFSCGMLRKQGLGKHPRFKKKGQHDSFTIDNCGKPIKLNGWNHKLPFIGIVRTYEPIEVATQKITISKQAGSWYLSCSYEFTPTSTPKTTEVVGVDLGVKTLATLSTGVVFPGAKSYRSFEDKLSRLQYLHRNKIIGSANWRAAQLKIAKLHRKIANIRLDTLHKLTTYLAKNHSVVAIEDLNISGMLANHKLAKSIADQGFYEFRRQLEYKTHWYGSELVVVDRFFPSSKTCSNCGHVQYLPLNVRTYDCPDCGISIDRDLNASINLRNAVGLTVNACG

SEQ ID NO: 4187 - protein, 368 aa, unidentified
MYKSIRTKLKLNNKQKTLLAQHAGYTRWCYNWGLSLWNAAYKNGYKPNVRIIREVFTNHTKPLYPWMKNLSSRVYQYAFPTECCANINLGEAFKRFFQGLGKYPRFKRKGRSDSFTIDNCGKPIELNGWSHKLPFIGIVKTYEPIEATTKKITISRQAGDWYLSCSYEFNFHTTSQKIDVVGVDLGVKTLATLSDGKVFESVRAYQKFEAKLSRLQYLNRHKEVGSANWKKAQQKIARSHRKVANIRQDALHKLTTYLAKNHGSVVIEDLNVRGMLANHRLAKSIADQGFYEFRRQLGYKCEWYGSELVVVDRFFPSSKTCSNCGHVQDMPLHLRTYDCPDCGLSIDRDLNASINLRNAVGSTVNACA

SEQ ID NO: 4188 - protein, 404 aa, unidentified
MITLTYQYKLKPSKQQETEINQILDVCRTVYNYALRERKDWLSSRKVAINSCSILTEYIIPADAPYPNYNHQAKNLTIAKKIHPRLKSVNAQVLQQTLKTLDRAFYEMKSLGKGFPRFKKKLRSFVFPAMLKNCLGNSRVKLPQLGWIKIKQSRPYPESFQAKQARIVRKATGYYLMITFSSSESVPDNPVGNKSLGIDAGIESFVATSTGKLIKSPKFLLGQLRELKLLQRRLKKKKKGSNNWLKLQNTIAKLHEKIADARRDWHFKLAHQICDLTDNIFVEDINFKSWSKGIVRKKSLDSGIGQFINEILPYICWKRGKYYAKVDKNYTSQECPKCGHIGKKKLSDRKHNCSHCNYQENRDVAAAKIIKNRGLIAVGHTVKEKACGNGLTGVQLNLFDLLSS

SEQ ID NO: 4189 - protein, 360 aa, unidentified
MKSIRTKLKLNNQQKTLMAQHAGYSRWCYNWGLSLWNAAYIHGYKPNARKLREVFTNHTKPLYPWMKNLSSRVYQYAFINLGEAFKRFFQGLGKHPRFKKKGKHDSFTIDNCGKPIELNGWNHKLPFIGIVKTYEPVEATTKKITISRQAGDWYLSCSYEFTPNPTEKTTEVVGVDLGVKTLATLSTGVVFPGAKSYKKFESKLSKLQYLNRNKKIGSANWKKAQLKIAKLHTKVANIRKDVLHKLTTYLAKNHSIVSIEDLNVRGMLANHKLAKSIADQGFYEFRRQLEYKCEWYGSELVVVDRFFPSSKTCSNCVHVQDMPLNVRTYDCPECGLSIDRDLNASINLRDAVGLTVNACG

SEQ ID NO: 4190 - protein, 356 aa, unidentified
MKSIRTKLKLNNRQKTLLAQHAGYSRWCYNWGLSLWNAAYQDGYKPNARKLREVFTNHTKPLYPWMKRLSSKVYQYAFINLGEAFKRFFQGLGKHPKFKKKGRSDSFTIDNCGKPIKLNGWSHKLPFIGWVKTYEPIEATTQKITISKQAGDWFLSLAFEFAPTVTPKNTEVVGVDLGVKTLATLSTGEVFPSIKPYRTAQDKLAKLQRQLSRKVKHSSNWYKAVVRLAKQHRRIADIRKDALHKLTTYLAKNHGTVSIEDLNVSGMLANHKLAKSIADQGFYEFRRQLEYKCQWYGCELVVVDRFFPSSKTCSSCGHVQDMPLNIRTYDCPECGLSIERDLNASINLRDAVGQDP

SEQ ID NO: 4191 - protein, 404 aa, unidentified
MIALTYQYKLRPNQQQEAEINQILDVSRIVYNYALRERKDWLSSKKSPINSCSIISEYIIPADTPYPSYNNQAKSLTIAKKTNPKLKSVNAQVLQQTLKTLDQAFSEMKSLGKGFPRFKKKLRSFVFPAMLKNCLGYTKVKLPQLGWIKIRKSRPYPEAMTAKQARIVKKASGYYLMITFTSSESVPDNPVGKVSLGVDAGIENFVATSTGQLIKSPKFLLSQLRELKLLQRRLKKKTIRSNNWFKYQNKIAKLHEKIANTRRDWHFKLAHQLCNLADNIFVEDINFNSWSRGIVRKQSLDSGIGQFINEILPFVCWKRGKYYAKVDKNHTSQECPGCGQRQKKKLSERSHNCSSCGYQINRDIAAAKVIRNRGLIAVGHTVNQNACGDVLAGVQLSLFDLLPS

SEQ ID NO: 4192 - protein, 404 aa, unidentified
MITLTYQYKLNQTQQQEIEINHILDVCKSVYNYALRERKDWSSARKSPINSCSIVSEYIIPADAPYPNYNHQAKNLTIAKKIHPKLKSVNAQVLQQTLKILDRAFSDMKSQGKGYPRFKKKLRSFVFPAMLKNCLGNNRVKLPQLGWIKIRQSRPYPDGFQAKQARIVKKASGYYLMIIFTSSELLPDNPVGKKSLGIDAGIESFVATSTGKLIKSPKFLFSQLRELKLLQRRLNKKKKGSNNWLKLQKKIAKIHEKIANTRRDWHFKLAHELCDNTDNIFVEDINFNSWSRGIVRKQSNDSGIGQFINEILPYICWKRGKYYGKVDKNYTSQECPKCGQIEKKKLSDRKHNCSNCGYEINRDIAAAKVIRNRGLIAVGHAVKEKACGDGLTGVQLSLFDLLPS

SEQ ID NO: 4193 - protein, 404 aa, unidentified
MITLTYQYKLKPTQHQEAEINHILDVCKSVYNYALRKRKDWLNSRKSSISSCSIISEYIIPADAPYPNYNHQAKNLTIAKKTNPRLKSANAQVLQQTLKQLDRAFSEMKSLGKGFPRFKKRMRSFVFPAMLKNCLGCGRFKLPQLGWIKLKQSRPYPEEMVVKQARIVKKASGYYLMITFTSSESVPDNPVGERSLGIDAGIESFVATSTGNLIKYPKFLLSSLRELKLLQRRLKKKIRGSNNWLKLQNKIARLHEKIANTRRDWHFKLAHQLCDFTDNIFVEDMNFKSWSQGIVRKQSLDSGIGQFINEILPYVCWKRGKYYYKVDKNYTSQECPLCGHIQKKKLSDRKHNSSSCGYQVNRDVAAAKVIRKRGLIAVGHTVNKKACGDGLAGVQLSLFDLLPS

SEQ ID NO: 4194 - protein, 379 aa, unidentified
MKSIRTKLKLNNKQKTLMAQHAGYSRWCYNWGLSLWNAAYKDGDKPNVSFGMLRKRKLREVFTNHTKPLYPWMKSLSSRVYQYAFINLGEAFKRFFQGLGKYPRFKKKGRSDSFTIDNCGKPIELNGWCHKLPFIGWVKTYEPIEATTQKITISRQAGDWYLSLAFECTPTSTPKTTNVVGVDLGVKTLATLSDGKVFESVKSYRKFEAKLSRLQYLNRNKNIGSANWRAAQLKIARLLRRVANIRKDALHKLTTYLAKNHGSAVIEDLNVSGMLANHKLAKSIADQGFYEFRRQLEYKCQWYGCELVVVDRFFPSSKTCSSCGHVQDMPLNLRTFDCPDCGISIDRDLNASINLRNAVGLTVDACGRSAADSSGGSRK

SEQ ID NO: 4195 - protein, 360 aa, unidentified
MKSIRTKLKLNNRQKTLLAQHAGYSRWCYNWGLSLWNAAYQDGYKPNARKLREVFTNHTKPLYPWMKRLSSKVYQYAFINLGEAFKRFFQGLGKHPKFKKKGRSDSFTIDNCGKPIKLNGWSHKLPFIGWVKTYEPIEATTQKITISKQAGDWFLSLAFEFAPTVTPKNTEVVGVDLGVKTLATLSTGEVFPSIKPYRTAQDKLAKLQRQLSRKVKHSSNWYKAVVRLAKQHRRIADIRKDALHKLTTYLAKNHGTVSIEDLNVSGMLANHKLAKSIVDQGFYEFRRQLEYKCQWYGCELVVVDRFFPSSKTCSSCGHVQDMPLNIRTYDCPECGLSIERDLNASINLRDAVGLTVNACG

SEQ ID NO: 4196 - protein, 360 aa, unidentified
MKSIRTKLKLNNQQKTLMAQHAGYSRWCYNWGLSLWNAAYIHGYKPNARKLREVFTNHTKPLYPWMKNLSSRVYQYAFINLGEAFKRFFQGLGKHPRFKKKGKHDSFTIDNCGKPIELNGWNHKLPFIGIVKTYEPVEATTKKITISRQAGDWYLSCSYEFTPNPTEKTTEVVGVDLGVKTLATLSTGVVFPGAKSYKKFESKLSKLQYLNRNKKIGSANWKKAQLKIAKLHTKVANIRKDVLHKLTTYLAKNHSIVSIEDLNVRGMLANHKLAKSIADQGFYEFRRQLEYKCEWYGSELVVVDRFFPSSKTCSNCGHVQDMPLNVRTYDCPECGLSIDRDLNASINLRDAVGLTVNACG

SEQ ID NO: 4197 - protein, 403 aa, unidentified
MITLTYQFKLKLTCQQTQEIENILVVCRRVYNFGLAERKAWLKSRKSPVNACSIISEYIFGVDTPYPNYFVQAKALTIAKQSLESLRSVNAQVLQQTLKTLDKAFTDMKAKGNGFPRFKKVMRSFVFPAMLKNCLANGKVKLPQLGWVNIRQSREYPTGFEAKQARIVKKASGYYLMITFQQYEECPDPVVGKTSLGIDAGIESFMATNLGELIKAPRFLLKAMRKLKWLQRRLKHKIKGSNNWLKLQRKIARLYESVANTRRDWQFKLAHYLCDKADNIFVEDINFNSWSRGIVRKRSLESGIGQFINEILPYISWKRNKFYLKVNKNGTSQECPKCHKMTGKKKLNQRLHDCQFCGHQENRDTAAAKVIKYRGKIAVGQSVMITENACGDGLAGVKQLTNL

SEQ ID NO: 4198 - protein, 407 aa, unidentified
MKQSVITLTYQFKLKLTCQQTQEIENILVVCRRVYNFGLAERKAWLKSRKSPVNACSIISEYIFGVDTPYPNYFVQAKALTIAKQSLESLRSVNAQVLQQTLKTLDKAFTDMKAKGNGFPRFKKVMRSFVFPAMLKNCLANGKVKLPQLGWVNIRQSREYPTGFEAKQARIVKKASGYYLMITFQQYEECPDPVVGKTSLGIDAGIESFMATNLGELIKAPRFLLKAMRKLKWLQRRLKHKIKGSNNWLKLQRKIARLYESVANTRRDWQFKLAHYLCDKADNIFVEDINFNSWSRGIVRKRSLESGIGQFINEILPYISWKRNKFYLKVNKNGTSQECPKCHKMTGKKKLNQRLHDCQFCGHQENRDTAAAKVIKYRGKIAVGQSVMITENACGDGLAGVKQLTNL

SEQ ID NO: 4199 - protein, 394 aa, unidentified
MSFRGFTYRLKPNALQEEAFLQFAGVCRLVWNLALEQRREHWRNYQARTGDNLNYVTQARELTALRRETDFIRAVSQTCQQYALKALDDAYRRFFKGLGSYPKPKKKGVNDAFTFNGREITVERLNNRWGRVRLPKIGWVKFRMTRNLSGKLTEATVSLTPLGWQISISCKDCDIRDFATEGAVGIDRGVSVPLMLSDGTAYMLPERLEVIERRARKAQRILARRKRGSNRHALARKRVAALKAKAARIRKHWAHETTTDICRNHGTAVIERLRTRDMTASAAGTVEEPGRNVAQKRGLNRAILNVGWHQIETLLFYKAHRVVKVDPRFTSQTCSCCGAVDSRSRKNQASFVCTTCGFHANADHNAALNILHRGNTPVVEPQVTAASKRKLHPV

SEQ ID NO: 4200 - protein, 400 aa, unidentified
MSFRGFTYRLRPSALQEESFAQFAGVCRLVWNLALEQRRHHWRNYQARTGDNLNYVTQARELTALRREVDFVRAVSQTCEQYALKALDDAYRRFFKGLGGYPQPKKKGVNDAFTFNGREIVVERLNRRWGRVRLPKIGWVRFRMTRNLSGKITEATVRLTPLGWQISIGCKDCDVQDFAKDGTVGIDRGVAVPLMLSDGASYTMPEMLAVLDRKARKAQRILARRKRGSNRHALARRRVVALKAKAARIRKHWAHETTTAICRNYGTVVIERLRTRDMTKSASGTMENPGKNVAQKRGLNRAILNVGWHQIETMLFYKAHQVVKVDPRFTSQTCSCCGAVDSRSRKNQASFVCTTCGFHANADHNAALNILHKGNTPVVEPSARMALKRELSGKPEILGL

SEQ ID NO: 4201 - protein, 400 aa, unidentified
MTASTQVDGSGHARYTFRLRVSSTARRRLLAEWDRCRWVWNECVARSKKAHRNGEKCGPASLDRMLTGARAMTPWLSEGASVPQQQTIRDFGTSRAKALKDIRERLPVRRRAGMPRHRKKHEANLTLNYTKRGFRLNDGRLNLAGGVVVTVVWSRHLPVAPSSVRVYRDSIGHWYASFVVPALVQPLAATGAVIGVDWGVRETATTTSDVHDLPHAGHGRKAQTKLSRYDRMMARRKPKKGRSASRGYREAKRWRAKTYAKIARQRQDAARKWAKKVVRDHDVIAVEDFRPKFLARTTMARKAADAAIGATKQALIEMGRKHGRGVLLVHPAHTTMDCARCGARAKHVLPLSERTYTCTACGAVSPRDKNSARVMLVRAGLDPAGVEGARPPGAPLPEAA

SEQ ID NO: 4202 - protein, 408 aa, unidentified
MATLRRSLGDAGHARYTYRLRVSSTARTALRAEWDQCRWVWNECVAKSRQVHVHNRQHPENKQTCGPAQLDKMLTEARAKTPWLREGASVPQQQTIRDFAKARSKALKDIEKRLPVWQRAGMPQPKKKREALPTLNYTTRGFRLKDGRLHLAGGIVVTVVWSRDLPSAPSSVRVYRDSLGHWYASFVVAAETRPLPVTGRVIGVDWGVKETATTTSDDHDLPHVQHGKIAAQRLARYQRMMGHRKPARGQAASRGYREAQRQAAKMHKKVARQRQDTARKWAKKVVRDHDAIAVEDFRPKFLAKTTMARKATDAAISATKTTLIEIGRKHGRDIRLVHPAHTTMDCASCGARTKHALPLSERTYTCTACGAISPRDKNSAHVMLVRAGLIPAGVEGVRPPGALLQEAA

SEQ ID NO: 4203 - protein, 385 aa, unidentified
MIKTQVVKLKVNKTMQKHLDALCDYRRYCWNKGLETWQLMYEAHTLNKKGNPSPNERRVRDELVANKADWQYDLSARCLQLAIKDLANAWKNFFDKSQPDWGIPSFKSKKSPRQGFKTDRAKIVNGKLRLDCPRSISKDSWHDLSSYEVLKMSEVKVVSIFKEKGAYYAALTYEEEPISKTKTHQKTAVDVNVGHFNYTDGKINVLPAKLQKLYKRIKHYQRMLARKREVNGKLATKSNNYFAVRTKLQRDYRKTANIQNDLLQQFTTKLVDNYDQIVIEDLAVKQMMMTHVASKGMQRSLFSKFRQILTYKCDWYGKELILADKTYPSTQRCTACGYVKKGEEKITLQGNKKHGTKHNEYICYECGYKNDRDKNAVLNLLALAR

SEQ ID NO: 4204 - protein, 385 aa, unidentified
MIKTQVVKLKVNKTIQKHLDALCDYRRYCWNKGLETWQLMYEAHTLNKKDNPSPNERRVRDELVANKADWQYDLSARCLQLAVKDLANAWKNFFDKSQPDWGIPSFKSKKAPRQGFKTDRAKIVNGKLRLDRPRSISKEDWFDLKSYEAMKMSKVKVVSIFKEKDSYYAALPYEEEISSKAKTYQKTAVDVNVGHFNYTEGQINVLPAKLQKLYKRIKHYQRMLARKREVNGKLATKSNNYFAVRTKLQRDYRKVANIQNDLLQQFTTKLVDNYDQIVIEDLAVKQMMMTHVASKGMQRSLFSRFRQILTYKCDWYGKELILADKTYPSTQRCAACGYVKKGEEKITLQGNKKHGTKHNEYICYECGYSNDRDENAVLNLLALVK

SEQ ID NO: 4205 - protein, 385 aa, unidentified
MIKTQVVKLKVNKTMQKQLDALCDYRRYCWNKGLETWQLMYEAHTLNKKDNPSPNERRVRDELVANKADWQYDLSARCLQLAVKDLANAWKNFFDKSQPDWGIPSFKSKKSPRQGFKTDRAKIVNGKLRLDRPRSISKDSWHDLSSYEVLKMSEVKVVSIFKEKGAYYAALTYEEEPISKTKTHQKTAVDVNVGHFNYTDGKINVLPAKLQKLYKRIKHYQRMLARKREVNGKLATKSNNYFAVRTKLQRDYRKTANIQNDLLQQFTTKLVDNYDQIVIEDLAVKQMMMTHVASKGMQRSLFSRFRQILTYKCDWYGKELILADKTYPSTQRCTACGYVKKGEEKITLQGNKKHGTKHNEYICYECGYKNDRDKNAVLNLLALAR

SEQ ID NO: 4206 - protein, 342 aa, unidentified
WIYNKFIETNQNLYKIGQSYMNGFAFSKWMNNVYLPSHPDKHWVKQSASKAVKQSIMNAHRAYQTFFKNKQGYPKFKKKSGIGSYYLIGTIHVQRHRIQLPKLGWIKLKERGYIPTNNIKSATIVKEYDRYYVSVLVDQPPLPIFKPKQTDGIGIDLGLKEAVFTPSGVKIRSFKTNQTIIKLDKSLKRQQRKLSRKKKGSHNWYKQLLKVQKLYRRIKNIKKDIKRKGILSILRTNPQFITIENLNIKGMMRNKRLANSFQQIGLGYIVEWLKIKCRDYGIELRQVDRFYPSSRICSDCGHIQPMPLNQRTYHCNHCGMIKDRDINASINLKQAADYTVIV

SEQ ID NO: 4207 - protein, 385 aa, unidentified
MIKTQVVKLKVNKTMQKHLDALCDYRRYCWNKGLETWQLMYEAHTLNKKDNPSPNERRVRDELVANKADWQYDLSARCLQLAVKDVANAWKNFFNKSQSDWGIPSFKSKKAPRQGFKSDRAKIVNGKLRLDRPRSISKESWFDLKSYEALKMDEVKVVSIFKEKGSYYAALPYEEDISAKAKTHQKTAVDVNVGHFNYTDGKINVLPAKLQKLYKRIKHYQRMLARKREVNGKLATKSNNYFVVRIKLQRDYRKIANIQNDLLQKFTTNLVDDYDQIVIEDLAVKEMMMTHVASKGMQRSLFSKFRQILTYKCDWYSKELILADKTYPSTQRCAECGYVKKGDEKITLQGNKKHGTKHNEYVCYECGYSNDRDENAVLNLLALAK

SEQ ID NO: 4208 - protein, 387 aa, unidentified
MKKAYKTEIKPTEEQITKIHRTIGVSRFIYNFYVSHNKEVYEREKKFVSGMDFSRWLNNEYIPSNIDKLWIKGVSSKATKQAIMNGEKAFKKFFNGKSGFPKFKKKKNQDVKAYFPKNNKTDWTIERHRIKIPTLGWVRLKEYGYIPANGRITSGTVSQKADRYYVSVLVDEDIQVNNKPHSEGIGIDLGLKDFAICSNGITKKNINKTKTVKKAEKKLKREQRKLSRKYESLKLRNKKEKGEAARQNIQKQIVKVQKLHQKLTNIRTDYINKTVSELIKQKPSFITIEDLNTKGMMKNRHLAKAVAQQKFYEFRIKLISKAKQNNIEIRVVDRFYPSSKTCSCCGNIKKDLKLSDRVYKCVNCNTSIDRDLNASINLANAKEYKIA

SEQ ID NO: 4209 - protein, 432 aa, unidentified
MAEQVKEAPAELIQTRVYELRPNKTMRKVLDEACDYRRYCWNQGLALWNEMYKARQTLKSSLSTDSKKLTEEQKVLLKDKPSPSERRVRNMLVADKKDWQYTQSARILQLAISDLGKAWNNFFDKAQPGWGKPKFRSKREARQGFKSDQSKIKDGILYLERARGSSVPKDQWRGFKLSEKPLSDEFGVVSYFKEKGRYYVAIPYKIKAEDIKLPDKTGKAAAVDVNVGHFDYTGGRVNVLPKKLDRIYKKIKHYQRQLAKKRVKNGEAACESKNYLKTKAKLQTCYRKASNIQNDLMHKFTTELVNDYDKIVIENLSVKDMLMSHVASKGVHRSMFGKFKQFLTYKCDWYGKELILANKLYPSTQRCAACGNVKKGDDKITLYGNKKHGTKHNEYVCYNQKCPNYNKVVDRDKNAMLSLLALTEHPELNHAL

SEQ ID NO: 4210 - protein, 432 aa, unidentified
MAEQIEEVPAELIQTRVYELHPNKTMRKVLDEACDYRRYCWNQGLALWNEMYKARKAIKSSLASDPKKLTEEQKVLLKEKPSPSERRVRNMLVADKKDWQYTQSARILQLAISDLGKAWNNFFDKAQPGWGKPKFRSKREARQGFKSDRSKIKDGILYLERARRSSVPKDQWCGFKLSEKPLSDEFGVVSYFKEKGRYYVAIPYKIKAEDVKLPDKTGKATAVDVNVGHFDYTGGRMNVLPKKLDKIYGKIKHYQRQLAKKQVKNGEAACESENYLKTKAKLQACYRKASNIQNDLMQKFTTELVNNYDKIVIENLSVKGMLMSHVASKGVHRSMFGKFKQFLTYKCDWYGKELILANKLYPSTQRCAACGNVKKGDDKITLYGNKKHGTKHNEYVCYNEKCPNYNKVVDRDKNAMLSLLALTEHPELNHAL

SEQ ID NO: 4211 - protein, 413 aa, unidentified
MRYTYRFRLDPTPEQRELLDQHRDTCRQLYNHALTEFEKIPESAGTLTQRVRQVRDQLTDLKLWWDELNDLYSTVAQAAVMRIEDSIKALSQLKQNGYNVGSLNWKAPKDFRSFTYIQSGFEFDSKNGQTVLSLSKLADVPLIKHRTIPDTETIKQVTIKKEPTGDWFASFVVDGKETPEKPTDPDRCVGIDVGILKYAHDTDGYAIESPDFSDERERLERAQRDLSRKEHGSTNWETQRQTVAERHADLKRKRRDFLHKLSNYYATEYDLVAVEDLDVKGLVELPRNSRNRAGVAWGTFLGMLEYKCEREGTHFVAVNPRGTTKECASCGVKTEKPLWMREHSCPACGFEADRDANAAWNILSRGLEEVGVGYSESTPVETALPVDTPVSAKRVVETGSPTLKERMASAVSE

SEQ ID NO: 4212 - protein, 410 aa, unidentified
MYYAYKYRLEPSDTHREELDRHRDICRQLYNHALYRFNQIPDDVGTVKQRVRSIRDELPSLKQWWDGLTGVYSTVLQTAVMRIADNIKRLGILKRNGKRVGQLKWKPPREFRSFTYSQSGFELKNTSGRTLLSLSKLGDIPIRLHRAIPDDAKLKQVTLKKEPTGEWFASFGVETPDDPPEKPENPTRCVGIDVGILSYTHDTSGTSVGSLDLADERDRLEREQRKLSRKEHGSKNYETQRRRVAECHADRKNKRRDFLHKLSNYYAKEFDLVAVEDLNVAGMMQFNSNSRNRASAAWSTFLRMLEYKCKREGTHFVRVDPRNTTKECAACGVKTDKPLWVREHSCPACGFTANRDWNAAWNILRRGIKLLGAGRSESTPVETALPTGTVAVPAKRVLEAGSPVLNARSA

SEQ ID NO: 4213 - protein, 415 aa, unidentified
MYYAYKYRLKPSDAHREELDRHRDICRQLYNHALYRFNQIPKDVATLNQRVRSIRDEIPALKDWWDGLSDVYSTVLQTAVMRIEQNVKALGKLKQNGYGVGQLKWKPPREFRSFTYSQSGFKLDKKGGRTLLCLSKLGDIPIRLHREIPDDATLKQVTLKKEPTGEWFATFGVERDREPPKKPENPEQCVGIDVGILTYAHDTDGHAVGSLDLSDERERLEREQRKLSRKEYGSNNYEKQRVVVARCHDRIKRKRRDFLHKLSDYYAREYDLVTVEDLNAKGLMELPSNSRNRASASWGTFLRMLEYKCEREGTHFVEVDPRGTTKECASCGVSSEKPPWVREHSCPSCGFEADRDANAAWNILFRGLADIGVDHSESTPVETALPVDTVVSAKGVLEAGSPALKEAAKRLSRAG

SEQ ID NO: 4214 - protein, 400 aa, unidentified
MTTPKSARETGHARYTYRLRMSSTARAALRAEWDRCRWLWNECVARSKKAYAGGEPCGPARLDRMLTEARSMAPWLAEGSSVPQQQLIRDFGKSRAKAQKDIKERLPVHRRAGMPKYKTKREALPTLNYTRRGFRLKGNRLHLAGGIALTVVWSRDLPADPSSVRVYQDSVGHWYASFVVPAEVQPLPETGRVLGIDWGVKETATTTSEAHDLPHAQHGKKAQAKLTRYDRMMARRKPKKGQAASKGYREAKKWRAKTYAKIARQRQDTGRKWAKKVVTDHDAIAVEDFKPKFLARSSLARKAADAAIGATKKALIEMGRKHGRDIRLVHPAHTTMDCASCGARTKHALPLSERIYTCTVCGVASSRDKNSARVMLARAGLNPAGVEGVRPPGAQLPEAA

SEQ ID NO: 4215 - protein, 400 aa, unidentified
MSVVKEAGEGGHARYTYRLRVSSTARTALLAEWDRCRWIWNECVARSKKAHAENKKCGPASLDKMLNEARAITPWLAKGSSVPQQQIIRDFGTSRAKALKDIKERLPVHRRAGMPQYKKKREALPTLNYTRRGFRLKNGRLHLAGNIVLTVVWSRALPADPSSVRVYQDVLGHWHCSFVVPAEVQPLPETGRVIGIDWGMKETATTTSDAHDLPHAEYGKKARAKLTRYDRMMARRKPAKGQAASRGYREAKKLRAKTYQKIARQRQDTGRKWARKVVTDHDAIAVEDFRPKFLARTSTARKAADAAIGATKRALMEMGRKHGRDVRLVHPAHTTMDCASCGARTKHALPLSERTYTCTACGAVSPRDKNSARVMLVRAGLKPAGVEGVRPPGALLQEAA

SEQ ID NO: 4216 - protein, 402 aa, unidentified
MGVGEGSRVRYTYRLRVSLTARVALEAEWARCRWVWNECVAKSKQVQERGRRTGVKETCGPAGLDRMLTEARRVMPWLREGSSVPQQQMIRDFGKARAKALKDIADRLPVNRRAGMPKLKKKRDTSLSLNYTTRGFQLRDGRLHLAKGIALTVVWSRELPSRPSSVRVYRDSLGDWYASFVVATSAEVLPATGAVIGIDWGVAETATTTSDAHDLPHAEFGSRAAQRLARYQRQMARRKPKHGQPSSRGYKESQRPAAKAHKKVARQRQDTGRKWAKRVVTDHDVIAVEDFKPTFLTKTTMARKAADAAIGATKAALVAMARKHGRDLRLINPAHTTMDCAQCGTRAKHRLPLSERTYTCTACGASSPRDKNSARVMLVRAGLNPAGAEGVRPVGALLPQAA

SEQ ID NO: 4217 - protein, 432 aa, unidentified
MAEQVEEVPAGLIQTRVYELHPNKTMRRVLDEACDYRRYCWNQGLALWNEMYKARQALKSSLASDSKKLTEEQKVLLKEKPSPSERRVRNMLVADKKDWQYTQSARILQLAISDLGKAWNNFFDKDQPGWGKPKFRSKREARQGFKSDRSKIKDGIFYLERARESSVPKDQWRGFKLSEKPLSDEFGVVSYFKEKGHYYVAIPYKIKAEDVKLPDKTGKATAVDVNVGHFDYTGGRVNVLPKKLDRIYKKIKNYQRQLAKKRVRNGEAACESKNYLKTKAKLQACYRKASNIQNDLMHKFTTELVNDYDKIVIENLSVKGMLMSYIASKGVHRSMFGKFKQILTYKCDWYGKDLILANKLYPSTQRCAACGNVKKGDDKITLYGNKKHGTKHNEYICYNKKCPNYNKVVDRDKNAMLSLLALTEHPELNHAL

SEQ ID NO: 4218 - protein, 432 aa, unidentified
MAEQIEEVPAELIQTRVYELHPNKTMRRVLDEACDYRRYCWNQGLALWNEMYKARQTLKSSLSTDSKKLTEEQKVLLKDKPSPSERRVRNMLVADKKDWQYAQSARILQLAISDLGKAWNNFFDKAQPGWGKPKFRSKREARQGFKSYQSKIKDGILYLERAKESSVPKDQWRGFKLSEKPLSDEFGVVSYFKEKGRYYVAIPYKIKAKDIKLPDKTGKATAVDVNVGHFDYTGGRINVLPKKLDKIYGKIKHYQRQLAKKQVKNGEAACESENYLKTKAKLQACYRKAGNIQNDLMHKFTTELINDYDKIVIENLSVKGMLMSHVVSKGVHRSMFGKFKQILTYKCDWYGKDLILANKQYPSTQRCAACGNVKKGDDKITLYGNKKHGTKHNEYVCYNQKCPNYNKVVDRDKNAMLSLLALTEHPELNHAL

SEQ ID NO: 4219 - protein, 432 aa, unidentified
MAEQIEEVPAELIQTRVYELHPNKTMRRVLDEACDYRRYCWNQGLALWNEMYKARQTLKSSLASDSKRLTEEQKVLLKEKPSPSERRVRNMLVADKKDWQYAQSARILQLAISDLGKAWNNFFDKAQPGWSKPKFRSKREARQGFKSDRSKIKDGILYLERAKESSVPKDQWRGFKLSEEPLSDEFGVVSYFKEKGRYYVAIPYKIKAEDVKLPDKTGKATAVDVNVGHFDYTGGRVNVLPKKLDRIYKKIKHYQRQLAKKRVQNGEAACESKNYLKTKAKLQACYRKASNIQNDLMQKFTTELVNDYDKIVIENLSVKGMLMSHVASKGVHRSMFGKFKQILTYKCDWYGKDLILANKLYPSTQRCAACGNVKKGDDKITLYGNKKHGTKHNEYVCYNEKCPNYNKVVDRDKNAMLSLLALTEYPELNHAL

SEQ ID NO: 4220 - protein, 432 aa, unidentified
MAEQVKEAPAELIQTRVYELRPNKTMRKVLDEACDYRRYCWNQALALWNEMYKARQALKSSLASDSKKLTEEQKVLLKEKPSPSERRVRNMLVADKKDWQYTQSARILQLAISDLGKAWNNFFDKAQPGWGKPKFRSKREARQGFKSDQSKIKDGILYLERAKESSVPKDQWRGFKLSEKPLSDEFGVVSYFKEKGRYYVAIPYKIKAKDIKLPDKTGKATAVDVNVGHFDYTGGRINVLPKKLDKIYGKIKHYQRQLAKKQVKNGEAACESENYLKTKAKLQACYRKASNIQNDLMQKFTTELVNNYDKIVIENLSVKGMLMSHVASKGVHRSMFGKFKQFLTYKCDWYGKELILANKQYPSTQRCAACGNVKKGDDKITLYGNKKHGTKHNEYVCYNQKCPNYNKVVDRDKNAMLSLLALTEHPELNHAL

SEQ ID NO: 4221 - protein, 353 aa, unidentified
MKTLKLRIKDKHCKVLDQLASEVNFVWNYVNDLGFRHLKRKGEFLSAFDIAKYTKGTSKECNLHSQTIQAVTEELVTRRKQFKKAKLKWRISNKKSARRSLGWVPFKKXAIKYAXGYVQYGKHQFKLWDSYGLSKYTLKTGSFVEDSRGRWYVCLVVESPKQDKSTATKSIGIDLGLKDIATCSDGTVISNPKFYRKYEQTLGIAQRARNKKRVRALHAKIANSRKDHLHKASTKLVNENALIIVGDLSAKKLVKTKMAKSVLDTGFSALKTMLKYKCENAGVLFEEVQEAYTTQICSCCGEITSSSPKGSTDFGIREWECMSCGTAHDRDINSALNILALGHKRLAVGITLF

SEQ ID NO: 4222 - protein, 371 aa, unidentified
MRRLLKAYRTEIRPSDEQAVMIHKTIGTCRYVYNLYLQKNKEAYKADSSFLSGYDFSKWLNNEHARREEFAWIKEVPSKAVKQAIMNAETAYKKFFKKLASFPCFKRKSDYGSFYLIGTIHVKRHLIQLPKLGKVRLKEKGYIPSAGVRSATVSREGDRYFVSVLVEEQEACKKKSGPSEGIGIDMGIKMFLYTSDGEHVANVSRSNQLAKLTKSLKHQQRKLARRVKGSANFQKQKVIVQRLHRRIRNIKTDLKRKTVLKIVKKNPQFITIEHLHVKGMMKNRTLSNAFQQIGIGYFTDWLKVKCAECEIELRRVDRFYPSSQICSCCGERKKMLLHVRTYDCEHCGMSLDRDWNASINLKNAKDYTVLV

SEQ ID NO: 4223 - protein, 368 aa, unidentified
MLKAYRTEIRPSDEQAVMIHKTIGTCRYVYNLYLQKNKEAYKADSSFLSGYDFSKWLNNEHARREEFAWIKEVPSKAVKQAIMNAETAYKKFFKKLASFPCFKRKSDYGSFYLIGTIHVKRHLIQLPKLGKVRLKEKGYIPSAGVRSATVSREGDRYFVSVLVEEQEACKKKSGPSEGIGIDMGIKMFLYTSDGEHVANVSRSNQLAKLTKSLKRQQRKLARRVKGSANFQKQKVIVQRLHRRIRNIKTDLKRKTVLKIVKKNPQFITIEHLHVKGMMKNRTLSNAFQQIGIGYLTDWLKVKCVEYEIELRRVDRFYPSSQICSCCGERKKMPLHVRTYDCEHCGMSLDRDWNASINLKNAKDYTVLV

SEQ ID NO: 4224 - protein, 412 aa, unidentified
MVQTKAERIKNTLRRTRERRKHQIPRVYQLKLQNLSKKDEEKLNRLFLEAKWFYNCIVADIENRLSGNTWKLKEVEIKTPEGLEKREIKQLSSHMRQGIVERIKRSLYSLKKAKEKGIKVGKLSFKSEVRSIPLKQYGTTYKISGDKNRVKIQGIKKKFRVLGLHQIPKSAELAEAQLVKKPSGYYLHVVCYLPKKEVLKEIKEKQVKEPVGIDLGIKHQLTLSNGEKFSWYIPETERLKKLQKELSRKQKGSKRYQKIKEKIRREWEYINNKRRDVQSKVISYLKKFLLIAVQDDNIKGWKEGYFGKQIQNTGIGGITARLRSLATLIPVVFVDRYEPTTQVCSFCGNRQKISLSERTFKCQKCGVEIDRDVNSARNVLRVALSRLADPLKSALPVDCGEVTPVEWVYSPR

SEQ ID NO: 4225 - protein, 385 aa, unidentified
MIKTQVVKLKVNKTMQKHLDALCDYRRYCWNKGLETWQLMYEAHTLNKKDNPSPNERRVRDELVANKADWQYDLSARCLQLAIKDLANAWKNFFDKAQPDWGIPSFKSKKAPRQGFKTDRAKIVNGKLRLDRPRSISKADWFDLKSYEALKMNEVKVISIFKEKGAYYAALTYEEEPISKTKTHQKTAVDVNVGHFNYTDGKINVLPAKLQKLYKRIKHYQRMLARKREVNGKLATKSNNYFAVRTKLQRDYRKVANIQNDLLQQFTTKLVDNYDQIVIEDLAVKQMMMTHVASKGMQRSLFSRFRQILTYKCNWYGKELILADKTYPSTQRCAACGYVKKGEEKITLQGNKKHGTKHNEYICYECGYKNDRDKNAVLNLLALAR

SEQ ID NO: 4226 - protein, 386 aa, unidentified
MTIKTQVVKLKVNKTMQKQLDALCDYRRYCWNKGLETWQLMYEAHTLNKKDNPSPNERRVRDELVANKADWQYDLSARCLQLAIKDLANAWKNFFDKSQPDWGIPSFKSKKAPRQGFKTDRAKIVNGRLRLDRPRSISKDSWHDLSSYEVLKMSEVKVVSIFKEKGAYYAALPYEEEISSKAKTYQKTAVDVNVGHFDYTDGKINVLPAKLQKLYKRIKHYQRMLARKREVNGKLATKSNNYFAVRTKLQRDYRKVANIQNDLLQQFTTKLVDNYDQIVIEDLAVKQMMMTHVASKGMQRSLFSRFRQILTYKCNWYGKELILADKTYPSTQRCAACGYVKKGDKKITLQGNKKHGTKHNEYICYECGYKNDRDENAVLNLLALAK

SEQ ID NO: 4227 - protein, 365 aa, unidentified
MRAYKSEIKPTGEQARLINQTIGVTRYVYNLFIMKNQDRYKRNLSFMSGYDFSRWLNNRHSKQNQWIKDVSSKAVKQSIMNADKSYRGFFSKKTGFPSYKKKSLKGSFYLIGTIKVGRHRIFLPKLKWIRLKEYGYIPNDNIKSATVSREGNRYFVSVLVDESPTQTISTEKSEPIGLDLGLKETVYLSNGQKLMSIYRNKQLLKLNQSLKRQQRKLARKQKGSNNRYKQLLKTNRLYQRISNIKSDMKRKFIHAIIATNPQYITIENLNIKGMMKNRRLSNALQQTGLGYIVEWLKLKSKQSDIELRQVSRFYPSSQLCHCCNHRQKMPLNKRIFRCENCGNETDRDLNASINLVNARDYVVLT

SEQ ID NO: 4228 - protein, 386 aa, unidentified
MTIKTQVVKLKVNKTMQKHLDALCDYRRYCWNKGLETWQLMYEAHTLNKKDNPSPNERRVRNELVANKADWQYDLSARCLQLAIKDLANAWKNFFDKSQPDWGMPSFKSKKAPRQGFKTDRAKIVNGKLRLDRPRSISKEDWFDLKSYEALKMSEVKVGSIFKEKDSYYAALPYEEEISSKAKTYQKTAVDVNVGHFNYTEGQINVLPAKLQKLYKRIKHYQRMLARKREVNGKSAVKSNNYFAVRIKLQRDYRKTANIQNDLLQQFTTKLVDNYDQIVIEDLAVKQMMMTHVASKGMQRSLFSRFRQILTYKCDWYGKELILADKTYPSTQRCAKCGYVKTGNEKITLQGNKKHGTKHNEYICYECGYSNDRDENAVLNLLALAK

SEQ ID NO: 4229 - protein, 410 aa, unidentified
MYYAYKYRLKPSDAHREELDRHRDICRQLYNHTLYRLNEYQDEHGELPSMTTLRSELPDLKKWWDGLSDVYSKVLQTVVERLFDNLKGLSALKENGYGVGQLTWKPPREFRSFTYSQSGFKLDKKGGQTVLSLSKLADIPIRLHRAIPDDAALKQVTVKKEPTGEWFATFGVEMDHEPPENPERCVGIDVGILKYAHDTDGTAVGSLDLSDERDRLEREQRKLSRKQHGSNNYEKQRRRVTECHADLRRKRRDFLHKLSAYYAREYDLVAAEDLNVKGMLESPSNSRNTASAAWRTFLSLLEYKCKREGTHFVAVNPRGTTKECASCGVSTEKPLWVREHSCPACGFEADRDANAAWNILSRGLKGVGVGYSESTPVETALAVDTSVSAKRVVEAGSPLLKERTASAVSE

SEQ ID NO: 4230 - protein, 414 aa, unidentified
MQAQTREAATMLHRGYKFRLYATDEQAAVFGQFAGVCRLVYNLALEQRRDWWWQAKANTGYSISYASQCRELTKLRAEFDWIAAVSVTCQEQALRDLDKAYSNFFAGRSGYPTPRKRGLNDAFRFKGRECPWRKLNAKWAVVKLPKIGDVKFRLTRDIPGAIKNVTVTLDALGWHVVFSTEVERAAAPNFGPAVGIDRGVVHTVALSDGRFMDMPRERLNVLDRRARKQARKLAKCKRGSSRRNTAKKLLASTKAKMARVRLHWNHERTAEIARTHGVVVLEALKARNMTASAAGTADAPGRNVRQKAGLNRAILNNAWYQFEEFLAYKLAERGGELRKVNPAFTSQACSCCGTIDKASRESQATFKCGHCGHTANADTNAARNILMAGTQPALRTSVGEPLKRKPMAAAYPPL

SEQ ID NO: 4231 - protein, 386 aa, unidentified
MTIKTQVVKLKVNKTMQKHLDALCDYRRYCWNKGLETWQLMYEAHTLNKKDNPSPNERRVRDELVANKADWQYDLSARCLQLAIKDLANAWKNFFDKSQPDWGIPSFKSKKAPRQGFKTDRAKIVNGKLRLDRPRSISKESWFDLKSYEALKMDEVKVVSVFKEKDNYYAALPYEEEIELKAKTQQKTAVDVNVGHFNYTEGQINILPAKLQKLYKRIKHYQRMLARKREFNGKLATKSNNYFAVRTKLQRDYRKAANIQNDLLQKFTTKLVNNYDQIVIEDLAVKKMMMTHVASKGMQRSLFSKFRRILTYKCDWYGKELILADKTYPSTQRCAACGYIKKGEEKITLQGNKKHGTKHNEYVCYECGYKNDRDENAVLNLLALAK

SEQ ID NO: 4232 - protein, 414 aa, unidentified
MYYAYKYHLEPSDAHREELDRHRDICRQLYNHALYRFDQIPEDTGTLNRRVRSIRDEIPSLKDWWDDLSDVYSTVLQTAVMRIEQNVKSLGGLKENGYGVGQLKWKPPREFRSFTYSQSGFKFDKKGGQTVLSLSKLAEIPIRLHRPIPDDATLKQVTLKKEPTGEWFATFGVEMERDPTEPPENPEECVGIDVGILKYAHDTDGTAVGSLDLSDERDRLEREQRKLSRKQHGSNNYETQRRRVAECHADLRRKRRDFLHKLSNYYATEYDFVAVEDLNVKGMMESPSYSRNTASAAWRTFLRMLDYKCERAGTHFVAVNPRGTTKECASCGVSTEKPLWVREHSCPACGFEADRDANAAWNILFRGLEDVGVGYSESTPVETALAVDTPVSAKRVVEAGSPTLKERTASAVSE

SEQ ID NO: 4233 - protein, 413 aa, unidentified
MRYTYRFRLDPTPEQRELLDQHRDTCRQLYNHALTEFEKIPESAGTLTQRVRQVRDQLTDLKVWWDELNDLYSTVAQAAVMRIEDSIKALSQLKQNGYNVGSLNWKAPKDFRSFTYIQSGFEFDSKNGQTVLSLSKIADVPLIKHRTIPDTETIKQVTIKKEPTGDWFASFVVDGKETPEKPTDPDRCVGIDVGILKYAHDTDGYVIESPDFSDERERLERAQRDLSRKEHGSTNWETQRQTVAERHADLKRKRRDFLHKLSNYYATEYDLVAVEDLDVKGLVELPRNSRNRAGVAWGTFLGMLEYKCEREGTHFVAVNPRGTTTECASCGVKTGKPLWMREHSCPACGFEADRDANAAWNILSRGLEEVGVGYSESTPVETALPVDTPVSAKRVVETGSPTLKERTASAVSE

SEQ ID NO: 4234 - protein, 413 aa, unidentified
MHYAYRFRLNPTLEQREQLDYHRDTCRQLYNHAFNELEQIPDSAGTLNQRVRQVRDQLTDLKEWWNELNDLYSTVAQAAVMRIEDSIKALSELKERGYNVGSLNWKAPQDFRSFTYVQSGFEFDSKNGQPVLSLSKLADIPIVNHREIPDDVTIKEVTIKKEPTGEWFASFAVDGKQTPEKPTDSERCVGIDVGILKYAHDTDGTAVGSLDLSDERERLERAQRDLSRKEHRSNNWEKQRKVVAQRHSDLTRKRRDFLHKLSNYYATEYELVAVEDLDAKGLVELPGNSRNRASAAWGTFKRMLEYKCDREGTHFVAVDPKDTTKECASCGVKTEKPLWVREHSCPSCGFETDRDANAAINILSRGYDQLGVGYSESTPVETALPVDTSVSAKRVVEAGSPTLKKRTASAVGE

SEQ ID NO: 4235 - protein, 413 aa, unidentified
MRYTYRFRLDPTPEQRELLDQHRDTCRQLYNHALTEFEKIPESAGTLTQRVRQVRDQLTDLKVWWDELNDLYSTVAQAAVMRIEDSIKALSQLKQNGYNVGSLNWKAPKDFRSFTYIQSGFEFDSKNGQTVLSLSKLADVLLIKHRTIPDTETIKQVTIKKEPTGNWFASFVVDGKETPEKPTDPDRCVGIDVGILKYAHDTDGYAIESPDFSDERERLERAQRDLSRKEHGSTNWETQRQTVAEHHADLKRKRRDFLHKLSNYYATEYDLVAVEDLDVKGLVELPKNSRNRVGAAWGTFLGMLEYKCEREGTHFVAVNPRGTTKECASCGVKTEKPLWMREHSCPACGFEADRDANAAWNILSRGLEEVGVGYSESTPVETALPVDTPVSAKRVVETGSPTLKERTASAVSE

SEQ ID NO: 4236 - protein, 413 aa, unidentified
MRYTYRFRLDPTPEQRELLDHHRDTCRQLYNHALNEFEKIPESAGTLTQRVRQVRDQLTDLKLWWDELNDLYSTVAQAAVMRIEDSIKALSQLKQNGYNVGSLNWKAPKDFRSFTYVQSGFEFDSKNGQTVLSLSKLADVPLIKHRTIPDTETIKQVTIKKEPTGDWFASFVVDGKETPEKPTDPDRCVGIDVGILKYAHDTDGYAIESPDFSDERERLERAQRDLSRKEHGSTNWETQRQIVAERHADLKRKRRDFLHKLSNYYATEYDLVAVEDLDVKGLVERPRNSRNRAGAAWGTFLGMLEYKCEREGTHFVAVNPRGTTKECASCGVKTEKPLWMREHSCPACGFEADRDANAAWNILSRGLEDVGVGYSESTPVETALPVDTPVSAKRVVETGSPTLKERTASSVSE

SEQ ID NO: 4237 - protein, 414 aa, unidentified
MYYAYTYRLKPSDAHREELDRHRDICRQLYNHMLYRLNEYQDEHGELPSMTTLRSELPDLKKWWDDLSDVYSKVLQTVVERLFDNLKGLSALKKNGYGVGQLKWKPPREFRSFTYSQSGFKLDKKSGQTVLSLSKLADIPIRLHRAIPGDAALKQVTVKKEPTGEWFATFGVQMDREPIEPPENPEKCVGIDVGILKYAHDTDGTAVGSPDLSAERDRLEREQRKLSRKQHGSNNYEKQRRRVAECHADLRRKRHDFLHKLSNYYAREYDLVAVEDLNVKGMMESPSNSRNTASAAWRTFLSLLEYKCEREGTHFVAVNPTGTTKECASCGVSTDKLLWVREHSCPACGFEADRDANAAWNILSRGLEDVGVGYSESTPVETALPTDTDSVSAKRVVEAGSPTLKERTASAVSE

SEQ ID NO: 4238 - protein, 433 aa, unidentified
MYYAYNYRLKPSDAHREVLDRHRDICRQLYNHALYRFDQIPEDAGTLNQRVRSIRDEIPDLKDWWDDLSDVYSTVLQTAVMRIEQNVKGLSKLKENGYDVGQLKWEPPREFRSFTYSQSGFKLDKKGGQTVMSLSKLADIPIRLHRAIPDVHKSDSSCAAHQKSPISEDDAKLKQVTVKKESTGEWFATFGVEMDREPPEPPENPEKCVGIDVGILKYAHDTDGTAVGSLDLSDERERLEREQRKLSRKQHGSNNYEKQRRRVARCHADLRRKRRDFLHKLSNYYATEYDLVAVEDLNVKGIMESPSNSRNTASAAWRTFLSLLEYKCEREGTHFVAVNPRGTTKECASCGVSTEKPLWVREHSCPACGFEADRDANAAWNILSRGLEDVGVGYSESTPVETALPVDTSVSAKRVVETGSPTLKERTASAVSE

SEQ ID NO: 4239 - protein, 351 aa, unidentified
MLRWLETCRWIYNTALAQRKEAWEREKRSVTRIEQQVWLKEAKKTDERLREIHSQVAQEVLFRVEKAFAAFFRRVKNGKTPGYPRFKGRGRYKSITFTQFGEGKGASFQDGKLRLSKIGLVKIRLHREIPGTIKTVTVKRDAAGKWWAIFAAEIELAQSQAHTGPAAGLDAGLEKFAALSDGSIIENPKYLRKMEKRLKHTQRNLSRKKKDSRNRKKARQKLAKLHAKVCNQRRDFLHKQSRRLVETYGLIAVEKLNIKGMVKNHHLAKSISDAGWGEFMAMLEYKAAEAGTKLVKVNPSGTSQVCSGCGMDVPKELSERTHCCPYCGLILDRDVNAARNILKKALALEAA

SEQ ID NO: 4240 - protein, 432 aa, unidentified
MAEQIEEVPAELIQTRVYELHPNKTMRRVLDEACNYRRYCWNQGLALWNEMYKARQALKSSLASDSKKLTEEQKVLLKDKPSPSERRVRNMLVADKKDWQYAQSARILQLAISDLGKAWNNFFDKAQPGWGKPKFRSKREARQGFKSDQSKIKDGILYLERAKESSVPKDQWRGFKLSEKPLSDEFGVVSYFKEKGRYYVAIPYKIKAKDIKLPDKTGKATAVDVNVGHFDYTGGRINVLPKKLDKIYGKIKHYQRQLAKKQVKNGEAACESENYLKTKAKLQACYRKASNIQNDLMQKFTTELVNNYDKIVIENLSVKGMLMSHVASKGVHRSMFGKFKQFLTYKCDWYGKELILANKQYPSTQRCAAYGNVKKGDDKITLYGNKKHGTKHNEYVCYNQKCPNYNKVVDRDKNAMLSLLALTEHPELNHAL

SEQ ID NO: 4241 - protein, 399 aa, unidentified
MAAGQADGAGHVRYTYRLRVSATARAALLAEWGRCRWVWNECVARSKKAHTEGEGCGPARLDRMLTEARALTPWLAEGASVPQQQLIRDFGKSRAKALKDIKDRLPVRLRAGMPGYKKKHEVDPTPNYTRRGFRLKGGRLHLTGGIVLTVVWSRSLPAEPSSVRVYRDSVGAWYASFVVPAGFEPLPETGRALGVDWGVKEIATTTSDAHDLPHPELGRKAKAKLSRYDRMTARRKPAKGQAASKGYKEAKKWRAKTYQKLARQRQDAARKWAKKAVRDHDVIAVEDFRPKFLAKTSMARKAADAAIGVTKKALLEMGRKHGRDIRLVNPAHTTMDCASCGARTKHALPLSERTYTCTACGVVSPRDKNSARVMLVRAGLNPAGVEGVRPLRAPLQEAA

SEQ ID NO: 4242 - protein, 407 aa, unidentified
MTMPQRVEGAGRARYTYRLRVSSTARTALLAEWDRCRWVWNECVAKSRQVHAHNRVHPEGKLTCGPAQLDRMLTDARSKLPWLRGGASVPQQQMIRDFAKSRSKALKDVEHGLPVRQRAGMPRHKRKRDAEPTLNYTTRGFRLKDGRLHLAGGIAVTVVWSRELPSAPSSVRVYRDSLGHWYASFVVTTKVQPIPETGAVLGIDWGVKETATTTSDAHDLPHAEHGKRAAQRLARYQRMMARRRPDKGQAASKGYRKAQRQAAQVSKKVARQRQDTARKWAKRVVRDHDAIAVENFRPKFLAKTTMARKAADATIGATKTALIEMGRKHGRDVRLVHPAHTTMDCASCGARTKHALPLSERTYTCTACKVVSPRDKNSARVMLVRAGLTAAGVEGVRPPGALLPEAA

SEQ ID NO: 4243 - protein, 378 aa, unidentified
MSNATSSLKETRNYKFRLYPNKEQESLLLRWLETCRWIYNTALAQRKEAWEREKRSVTRIEQQVWLKEAKKTDERLREIHSQVAQEVLFRVEKAFAAFFRRVKNGKTPGYPRFKGRGRYKSITFTQFGEGKGASFQDGKLRLSKIGLVKIRLHREIPGTIKTVTVKRDAAGKWWAIFAAEIELAQSQAHTGPAAGLDAGLEKFAALSDGSIIENPKYLRKMEKRLKHTQRNLSRKKKDSRNRKKARQKLAKLHAKVCNQRRDFLHKQSRRLVETYGLIAVEKLNIKGMVKNHHLAKSISDAGWGEFMAMLEYKAAEAGTKLVKVNPSGTSQVCSGCGMDVPKELSERTHCCPYCGLILDRDVNAARNILKKALALEAA

SEQ ID NO: 4244 - protein, 493 aa, unidentified
MHQQVDVIVLAVALDQFRLEIPTDFGEDVAKVADSRLRQHIAAVFRNEDQVSMQHVNYMPSSSVIHICYPWTNCYTGTMIQRGYRYKLKPTPAQDRLFSQCAGVCRLIYNLALEQRRDHWRAFKRQTENSISYPSQARELTCLRAEYDWIAAVSQTCQQQALRDLDRAYQNWFKGIARYPSPRKKGRNDTFRFQGREVQVRKLNDKWSEVRLPKIGWVRFRDTRQLVGKLNNATISLAPNGWHISFVLAIEHDAPASIAPAVGVDRGVANTLALSTGERLSVPASLEALEQRQRRAQRALSRRKRGSKRYAKARRRVAALSARRARIRKDWHHRTSLELSKRFGTVVIEDLNTKGMTASAKGTVAEPGRMVRQKSGLNRSILNQGWHIFETLLSYKLEERGGELIRVPAQHTSQTCSACGAVDSRSRKNQASFVCTSCGHFENADTNAAKVILRRNTASMFVEEGYWVSVEARTIGEAKGQTGNLRPSGRGRC

SEQ ID NO: 4245 - protein, 415 aa, unidentified
MIQRGYRYKLKPTPAQDRLFSQCAGVCRLIYNLALEQRRDHWRAFKRQTENSISYPSQARELTCLRAEYDWIAAVSQTCQQQALRDLDRAYQNWFKGIARYPSPRKKGRNDTFRFQGREVQVRKLNDKWSEVRLPKIGWVRFRDTRQLVGKLNNATISLAPNGWHISFVLAIEHDAPASIAPAVGVDRGVANTLALSTGERLSVPASLEALEQRQRRAQRALSRRKRGSKRYAKARRRVAALSARRARIRKDWHHRTSLELSKRFGTVVIEDLNTKGMTASAKGTVAEPGRMVRQKSGLNRSILNQGWHIFETLLSYKLEERGGELIRVPAQHTSQTCSACGAVDSRSRKNQASFVCTSCGHFENADTNAAKVILRRNTASMFVEEGYWVSVEARTIGEAKGQTGNLRPSGRGRC

SEQ ID NO: 4246 - protein, 414 aa, unidentified
MYYAYKYRLKPSDSHREELDRHRDICRQLYNHALYRFNQIPEDTGTLNQRVRSIRDEIPSLKDWWDGLSDVYSTVLQTAVMRIEQNVKSLGGLKQNGYGVGQLNWKPPREFRSFTYSQSGFKLDKKGGQTILSLSKLAEIPIRLHRPIPDDATLKQVTVKKEPTGEWFATFGVEMDREPPAPPENPEKCVGIDVGILKYAHDTDGTAVGSLDLCDERERLEREQRKLSRKQHGSNNYENQRRRVAECHADLRRKRRDFLHKLSNYYAREYDLVAVEDLNVKGMIESPSNSRNTASAAWRTFLSLLEYKCEREGTHFVAVNPRGTTKECASCGVSTDKPLWVREHACPACGFEADRDANAAWNILSRGLEDVGVGYSESTPVETALPVDTPVSAKRVVEAGSPTLKERTASAVSE

SEQ ID NO: 4247 - protein, 413 aa, unidentified
MRYTYRFRLDPTPEQRELLDQHRDTCRQLYNHALNEFEKIPESAGTLNQRVRQVRDQLTDLKVWWDELNDLYSTVAQAAVMRIEDSIKALSQLKQNGYNVGSLDWKAPKDFRSFTYIQSGFEFDSKNGQTVLSLSKLADVPLIKHRTIPDTETIKQVTIKKEPTGDWFASFVVDGKETPEKPTDPDRCVGIDVGILKYAHDTDGYAIESPDFSDERERLERAQRDLSRKEHGSTNWETQRQIVAERHADLKRKRRDFLHKLSNYYATEYDLVAVEDLDAKGLVELPRNSRNRAGAAWGTFLRMLEYKCEREGTHFVAVNPRGTTKECASCGVKTEKPLWMREHSCPACGFEADRDANAAWNILSRGLEEVGVGYSESTPVETALPVDTPVSAKRVVETGSPTLKERTASAVSE

SEQ ID NO: 4248 - protein, 419 aa, unidentified
MHYAYRFRLKPTTEQRELLDYHRDTCRQLYNHALREFNEIPESAGTLNQRVRQVRDQLTDLKEWWDELNDLYSTVAQAAIMRIEDSITALGELKEKGYDVGSLNWKAPRDFRSFTYVQSGFEFDKKNGQTVLSLSKLADIPIERHRDIPDEETVKEVTLKKEPTGEWYASFAVDDKNEPPKPSLEDVDAGEMVGIDVGILKYAHDTDGTAVGSLDLSDERDRLEREQRNLSRKEHGSNNWEKQRQTVAECHQQIKRKRRDFLHKLSNYYAREYDLVAVEDLDVKRMLESPGNSRNTASAAWNTFTDLLAYKCKREGTHFVEVEPEGTTKECAVCGVETDKPLWVREHSCPACGFEADRDANAAWNILSRGRNDLGVGHSEETPVETALPVDTAVVSAKRVVEPGSPCLKEPPEAASRQG

SEQ ID NO: 4249 - protein, 400 aa, unidentified
MMTPLTVGEAGHVRYTYRLRASSTARAALRAEWDRCRWLWNECVARSMKAYAEGETCGPARLDKMLTEARSTTPWLAEGSSVPQQQLIRDFGKSRAKAQRDIKERLPMHRRAGMPQCKKKHEALPTLNYTKRGFRLKGGRLHLSGGVVLTVVWSRDLPAAPSSVRVYQDGVGHWYCSFVVPTVVQPLPKTGRVLGVDWGVKQTATTTSDAHDLPHPEHGKKAHKKLARYDRMMARRKPKKGQAASKGYREAKKWRAKTYAKIARQRQDTGRKWAKRAVTDHDAIAVEDFRPKFLAKSSLARKAADAAIGATKRALIEMGRKHGRHIRLVHPAHTTMDCASCGARTKHALPLSERTYTCTACGAVSPRDKNSARVMLIRAGLNPAGVEGIRPPGALLPEAA

SEQ ID NO: 4250 - protein, 399 aa, unidentified
MTPLTVGEAGHVRYTYRLRASSTARAALRAEWDRCRWLWNECVARSMKAYAEGETCGPARLDKMLTEARSTTPWLAEGSSVPQQQLIRDFGKSRAKAQRDIKERLPMHRRAGMPQCKKKHEALPTLNYTKRGFRLKGGRLHLSGGVVLTVVWSRDLPAAPSSVRVYQDGVGHWYCSFVVPTVVQPLPKTGRVLGVDWGVKQTATTTSDAHDLPHPEHGKKAHKKLARYDRMMARRKPKKGQAASKGYREAKKWRAKTYAKIARQRQDTGRKWAKRAVTDHDAIAVEDFRPKFLAKSSLARKAADAAIGATKRALIEMGRKHGRHIRLVHPAHTTMDCASCGARTKHALPLSERTYTCTACGAVSPRDKNSARVMLIRAGLNPAGVEGIRPPGALLPEAA

SEQ ID NO: 4251 - protein, 306 aa, unidentified
MIKTQVVKLKVNKTMQKHLDALCDYRRYCWNKGLETWQLMYEAYTLNKQDNPSPNERRVRDELVAHKADWQYDLSARCLQLAVKDLANAWKNFFDKSQSDWGIPSFKSKKAPRQGFKTDRAKIVNGKLRLDRPRSISKESWFDLKSYEALKMDEVKVVSIFKEKGSYYAALPYEEDMPAKAKTHQKTAVDVNVGHFNYTEGQINVLPAKLQKLYRRIKHYQRMLARKREVNGKLATKSNNYFAVRAKLQRDYRKVANIQNDLLQKFTTKLIDNYDQIVIEDLAVKEMMMTHVASKGMQRSLFSKFR

SEQ ID NO: 4252 - protein, 407 aa, unidentified
MATLRKGSGDAGHVRYAYRLRMSSTARTALRAEWDRCRWVWNECVAKSRQVHVHNRQHPEKQTCGPAQLDKMLTEARAKTPWLCEGASVPQQQTIRDFAKARSKALKDIEKRLPVWQRAGMPRPKKKREALPTLNYTTRGFRLKDGRLHLAGGIVVTVVWSRELPSAPSSVRVYRDSLGHWYASFVVAAETRPLPATGRVIGVDWGVKETATTTSDDHDLPHVQHGKTAAQRLARYQRMMGRRKPARGQAASRGYREARRQAAKMHKKVARRRQDTARKWAKKVVRDHDAIAVEDFRPKFLARTTMARKAADAAISTTKTTLIEMGRKHGRDVRLVYPAHTTMDCASCGARTKHALPLSERTYTCTACGVMSPRDKNSARVMLVRAGLIPAGVEGVRPPGALLPEGA

SEQ ID NO: 4253 - protein, 407 aa, unidentified
MITLTYQFKLKLTRQQIEKVEHTLEICRRVYNLALSERKHWLNSRKSPANACSIISEYIIPVDAPYPNYIHQAKSLTAAKQSNEDLRSVNAQVLQQTLKTLDKAFSDMKAKGNGFPRFKKTMRSFVFPQLLNNCLAEGKVKLPQLGWVKIRQSREYPTGFEAKQARIVKKARGYYLMLYFQSSEQCPEPIVGKTSLGIDAGIESFVATSQGELIKAPRLLLKAQSKLKLLQRRLKHKVKGSKSWLKLQNKIARLHESVANTRRDWHFKLAHYLGDLAENIFVEDINFVSWSRGIVRQRSLESGIGQFINEILPYVAWKRHKLYLKVDKNGTSQECPSCHQATGKKKLSERSHNCQFCGHRENRDTASAKVIEYRGKIAVGQPVIQNACEDVLTGIKQRTLFDLVKCL

SEQ ID NO: 4254 - protein, 400 aa, unidentified
MLNRGYKFRLYATAEQGVLFGQYVAVCRLVYNLALEQRRDWWRQFKANTGSSISYASQCRELTALRAEFDWIAAVSIICQQQALRDLDRTFGNFFAGRADYPTPRKRGLNDAFRFNGRECPWRKLNAKWGAVKLPKIGEVKFRLTRDMPVTVKNVTVTRDDLGWHVVFSTEVEHDVPQNFGPAVGIDRGVVRTLALSDGTFRDLDRERLNLLDRRARKQARALSRKKRGSRRRAEAKRLVAHTKATAARLRRHWNHERSREIADAFGVVVLEALDTKGMTASAKGTAAKPGRNVRQKAGLNRAILNNNWHQFETFVGYKLAANGGQLVKVPAAYTSQTCSSCGIVDKASRESQATFKCGHCGHAANADTNAARNILRAGTQPAPRLADGRSVKRELKRVA

SEQ ID NO: 4255 - protein, 417 aa, unidentified
MSGRGVGGGVVLVVKEGGEGGHARYTFRLRVSSTALTQLLAEWDRCRWIWNECVAKSRAVYAHNKAHPEEKLTCGPAQLDKMLTEARARTPWLREGSSVPQQQIIRDFGTSRAKAQKDIKERMPLKQRAGMPKHKKKREADPTLNYTKRGFRLKDGRLHLAGGIVLRVVWSRELPAEPSSVRVYRDSLGHWYASFVVPAEVQPLPATGAVIGIDWGVKETATTTSGAHDLPHAQHGRKAQQKLSRYDRMMARRKPAKGQAASKGYREARHLRAKACKKIARQRQDTGRKWAKKVVTDHDAIAVEDFKPKFLTRTSMARKAADAAIGATKQALIEMGRKHGRDIRLVHPPYTTMDCASCGARTKHALPLSERTYTCTACGAVSSRDKNSARVMLLRAGLNPAGVEGIRPPGAPLREAA

SEQ ID NO: 4256 - protein, 399 aa, unidentified
MAASEAGGIGHVRYTYRLRMSSTALSGLLAEWDRCRWVWNECVARSKKAHIDGEECGPARLDRMLTEARAVTPWLAERSSVPQQQLIRDFGRCRAKALKDIKDGLPVRQRAGMPGFKKKNEAEPSLNYTRRGFRLRDGRLHLAGCIVVSVVWSRELPAEPSSVRVYRDSVGHWYASFVVPAEVQLLPETGAVIGVDWGVKETATTTSDTHDLPHAEHGKKARKKLSRYDRMMARRKPKKGEPASNGYRKAKRLRAKTYQKIARQRQDTSRKWAKKVVTDHDAIAVEDFRPKFLAKSTMARKAADAAISATKKALLEMGRKHGRDVRLVDPAHTTMDCASCGARAKHALPLSERTYTCTACGAVSPRDKNSAHVMLVRAGLNPAGADGGRPPGAPFQQAA

SEQ ID NO: 4257 - protein, 435 aa, unidentified
MVEVYRGHNARLSLEPEQVRKLDAQAHAARALWNLLHDWWTMVGENRRVSVKDADAVIRQARKDIDWLAVLPAQAAQAVLKTYVQAWKNCWEGRAGRPLFKARLRSPMSVDIPQGQHMDITRVHRRWGMVNIPRAGRVRFRWTRDLPVGRRADADNRITGARLVKDALGWHIVFRVHTLEEDPQLHSGGDVGIDVGVTVPLALSDGDHHDHGRPSRMKDGKADRDKWLTIEEKAELARCEHQAAHRKSFRERGERTSRRLSETYDRIRALRARAKRRHLDWQHKTTTDIAKTYGTVVVEDLNITNMTRSARGKVEQPGKNVRTKAGLNRSISQEAWGRTVSLLEYKLARRGGALHRVPARGTSQRCSMCGCTTPGNRESQAVFVCKNITCGWSGNADYNAARNILHLYRMGLALVPAAGRAAVRRARRAEPATAR

SEQ ID NO: 4258 - protein, 419 aa, unidentified
MNYNYRYRLTPTESQRETLDYHRDTCRQLYNHTLYRFNQIPEDEGTVKQRVRKIRDELPDLKDWWDALTDVYSKVLQPTVMRIAKNIKRLGQLKEQGYKVGELRWKSPREFRSFTYNQSGFELDKKGGQTVLSLSKLADIPIELHRPLPEDATIKEVTLKKEKPGEWFAIFGIEMDTEPPAKPPLADIDTDDMVGIDVGILKYAHDTDGTAVESLALSEERDRLEREQRKLSQKAYESNNWQKQRRRVAECHLDIKRKRRDFLHKLSNYYAREYELVAVEDLDVKGMLESQRNSRNTASAAWNTFTDMLETKCEREGTHFVEVGPEGTTKECAQCGVETDKPLWVREHSCPACSFEADRDANAAWNILSRGLTELGVGYSESTPVETALPVGTAVVPAKRVVEAGSPTLSERVSASRVG

SEQ ID NO: 4259 - protein, 419 aa, unidentified
MNYNYRYRLTPTESQRETLDYHRDTCRQLYNHTLYRFNQIPEDEGTVKQRVRKIRDELPDLKDWWDALTDVYSKVLQPTVMRIAKNIKRLGQLKEQGYKVGELRWKSPREFRSFTYNQSGFELDKKGGQTVLSLSKLADIPIELHRPLPEDATIKEVTLKKEKPGEWFAIFGIEMDTEPPAKPPLADIDTDDMVGIDVGILKYAHDTDGTAVESLALSEERDRLEREQQKLSQKAYESNNWQKQRRRVAECHLDIKRKRRDFLHKLSNYYAREYELVAVEDLDVKGMLESQRNSRNTASAAWNTFTDMLETKCEREGTHFVEVGPEGTTKECAQCGVETDKPLWVREHSCPACSFEADRDANAAWNILSRGLTELGVGYSESTPVETALPVGTAVVPAKRVVEAGSPTLSERVSASRVG

SEQ ID NO: 4260 - protein, 414 aa, unidentified
MYYTYKYRLKPSDAHREELDRHRDICRQLYNHALYRLNEFQDEHGELPSMTTLRSELPDLKKWWDDLSDVYSKVLQTVVERLFDNLNGLSKLKENGHSVGQLKWKPPREFRSFTYSQSGFNLDKKGGQTVLSLSKLADIPIRLHRAIPDDATVKQVTLKKEPTGEWFATFGVQMDREPPEPPENPETCVGIDVGILKYAHDTDGTAVESLDLSDEREWLEREQRKLSRKQHGSNNYEKQRRRVAECHADLRRKRRDFLHKLSAYYAREYDLVAVEDLNVKEMMESPSNSRNTASAAWRTFLSLLEYKCEREGTHFVAVNPRGTTKECASCGVSTDKPLWVRDHSCPACGFEADRDANAALNIRSRGLEDVGVGHSESTPVETALPTDTNSVSAKRVVEAGSPCLKERTASAVSE

SEQ ID NO: 4261 - protein, 386 aa, unidentified
MTIKTQVVKLKVNKTMQKQLDALCDYRRYCWNKGLETWQLMYEAHTLNKKDNPSPNECRVRDELVANKADWQYDLSARCLQLAIKDLANAWKNFFDKSQPDWGIPSFKSKKAPRQGFKTDRAKIVNGRLRLDRPRSISKDSWHDLSSYEVLKMSEVKVVSIFKEKGAYYAALPYEEEISSKAKTYQKTAVDVNVGHFDYTDGKINVLPAKLQKLYKRIKHYQRMLARKREVNGKLATKSNNYFAVRTKLQRDYRKVANIQNDLLQQFTTKLVDNYDQIVIEDLAVKQMMMTHVASKGMQRSLFSRFRQILTYKCNWYGKELILADKTYPSTQRCAACGYVKKGDKKITLQGNKKHGTKHNEYICYECGYKNDRDENAVLNLLALAK

SEQ ID NO: 4262 - protein, 353 aa, unidentified
MKTLKLRIKDKHCKVLDQLASEVNFVWNYVNDLGFRHLKRKGEFLSAFDIAKYTKGTSKECNLHSQTIQAVTEELVTRRKQFKKAKLKWRVSNKKSARRSLGWVPFKKVAIKYATGYVQYGKHQFKLWNSYGLSKYTLKTGSFVEDSRGRWYVCLVVESPKQDKSTATKSIGIDLGLKDIATCSDGTVISNPKFYRKYEQKLCIAQRARNKKRVRALHAKIANSRKDHLHKASTKLVNENALIIVGDLSAKKLVKTKMAKSVLDTGFSALKTMLKYKCENAGVLFEEVQEAYTTQICSCCGEITSSSPKGRTDLGIREWECMSCGTAHDRDINSALNILALGHKRLAVGITLF

SEQ ID NO: 4263 - protein, 403 aa, unidentified
MTYPFKLKVNRQQTQEIEHILSVCRSVYNYALAERKHWYNSRKSPVNSCSLISEYIIPANALYPSYNNQAKNLTVAKKTNQDLKSVNAQVLQQTLKTLDKAFSDMKSKGFGFPRFKKQMKSFVFPAMLKNCLAEGKVKLPQLGWLKITQSRDYPTGFEAKQARIVKKATGYYLMIAFQSQESCPSAPVGKTSLGIDAGVESFVATDKGELIKAPKFLLKAQSQLKLLQRRLKHKIKGSNNWLKLQNKIAKLHEKVANTRRDWHFKLANYLCELTDNIFVEDINFTSWSRGIVRKQSLDSGIGQFINEILPFVCWKRSKFYLKVNKDGTSQECSNCGNHTGKKHLKERIHHCQYCGYTAPRDVVSAEVIKNRGLIAVGHTVNQNAYGDVLTGISQDLISLVKCL

SEQ ID NO: 4264 - protein, 413 aa, unidentified
MYYAYKYRLKPSDAHREELDRHRDICRQLYNHTLYRLNEYQDEHGELPSMTTLRSELPDLKQWWDDLSDVYSKVLQTVVERLFDNLKGLSKLKENGYGVGHLKWKPPREFRSFTYSQSGFKLDKKGGQTVLSLSKLGDIPIRLHRAIPDDAKLKQVTVKKEPTGEWFATFGVEMDREPPEPPENPETCVGIDVGILKYAHDTDGTAVGSLDLSDERDRLEREQRKLSRKQHGSNNYEKQRRRVTECHADLRRKRRDFLHKLSAYYAREYDLVAVEDLNVKGMMESPSNSRNTASAAWRTFLSLLEYKCEREGTHFVAVNPRGTTKECASCGVSTDKPLWVREHSCPACGFEADRDANAAWNILSRGLEDVGVGYSESTPVETALPVDTPVSAKRVVEAGSPTLKEPTASAVSE

SEQ ID NO: 4265 - protein, 418 aa, unidentified
MHYAYRYRLHPTEAQRETLDYHRDTCRQLYNHALNEFEQIPDSAGTLNQRVRQVRDQLPNLKDWWNELTDLYSTVAQAAVMRIEDSIKALSQLKQNGYNVGSLNWKAPSEFRSFTYIQSGFEFDKKNGQTVLSLSKLADIPISYHREIPEDVTIKEVCIKKERTGEWYASFAVEGKEEPPKPANPDRCVGIDVGILKYAHDTDGRAVGSLDLQDERERLTREQRSLSRKQHGSNNWETQRLRVAECHQRVKRKRHDFLHKLSNYYATEYDLVAVENLNVKSMLESSGNSRNTASSAWDTFTTMLAYKCNREGTHFVEVEPTGTTKECASCGVESDKPLWVREHSCPACGFGMDRDANAAINILSRGFEKLGLGQSEDTTPVETALPMFTSSGTSEVVDVKRVVETGSPTLKEAASAAE

SEQ ID NO: 4266 - protein, 385 aa, unidentified
MIKTQVVKLKVNKTMQKHLDALCDYRRYCWNKGLETWQLMYEAHSLNKQDNPSPNERRVRDELVANKADWQYDLSARCLQLAVKDLANAWKNFFDKAQSDWGKPKFRSKKAPRQGFKTDRAKIVNGNLCLDKPRSISKESWFDLVSYESLKMSEVKVVSIFKEKGSYYAALTYEEEISSKAKTHQKTAVDINVGHFNYTEGQINVLPAKLQKLYKRIKHYQRMLARKREVNGKLATKSNNYFAVRTKLQRDYRKVANIQNDLLQKFTTKLIDNYDQIVIEDLAVKEMMMTHVASKGMQRSLFSKFRLILTYKCDWYGKELILANKTYPSTQRCAQCGYVKKGDEKITLQGNKKHGTKHNEYICYQCGYSNDRDENAVLNLLALAE

SEQ ID NO: 4267 - protein, 414 aa, unidentified
MYYAYKYRLKPSDAHREELDRHRDICRQLYNHALYRFDQLPEDAGTLNQRVRSIRDEIPSLKDWWNGLSDVYSTVLQTAVMRLEQNVKSLGGLKENGYGVGQLTWKPPREFRSFTYSQSGFKLDKKGGQTVLSLSKLADIPIRLHRAIPDDAKLKQVTLKKEPTDEWFATFGVELDREPPEPPENPERCVGIDVGILTYAHDTDGTAVGSLDVSDERDRLEREQRKLSRKQHGSNNYEMQRRRVAECHADLRRKRRDFLHKLSNYYAREYDLVAVEDLNVAGMMESPSNSRNTASAAWRTFLSLLEYKCKRAGTHFVAVNPRGTTKECASCGVSTDKPLWVREHSCPACGFESDRDANAAWNILSRGLEDVGVGHSERTPVKTALPVDTSVSAKRVVETGSPTLEERTASAVSE

SEQ ID NO: 4268 - protein, 419 aa, unidentified
MHYAYRFRLKPTADQRELLDYHRDTCRQLYNHALTEFNKIPESAGTLNQRVRQVRGQLTDLKDWWDELNDLYSTVAQATVMRIEDSVTALSELKEKGYNVGSLNWKAPRDFRSFTYVQSGFEFDKKNGQTVLSLSKLADIPIECHRQIPDDETVKEVTLKKEPTGEWYASLAVDDKEEPSKPSLAEINDDDMVGIDVGILKYAHDTDGTAVGSLDLVDERDRLEREQRNLSRKEHRSNNWEKQRRRVAECHQEIKRKRRDFLHKLSNYYAREYDLVAVEDLDVKGMLASPGNSRNTASAAWNTFTDLLEYKCKREGTHFVEVDPEGTTKECASCGVKTDKPLWVREHSCPACGFEADRDENAAWNILSRGLTDLGVGHSEGTPVETALPTGTAVVPAKRVLEAGSPCLKEPPKAASRQG

SEQ ID NO: 4269 - protein, 413 aa, unidentified
MYYAYKYRLKPSDAHREELDRHRDICRQLYNHTLYRLNEYQDEHGDLPSMTTLRSELPDLKKWWDGLSDVYSKVLQTVVERLFDNLKGLSKLKENGYGVGQLKWKPPREFRSFTYSQSGFKLDKKGGQTVLSLSKLADIPIRLHRAIPDDANLKQVTIKKEPTGEWFATFGVEMDREPPEPSENPEKCVGIDVGILKYAHDTDGTAVGSLDLSDERDRLEREQRKLSRKQHGSNNYEKQRRRVAECHADLRRKRRDFLHKLSAYYAREYDLVAVEDLNVKEMMETPSNSRNTASAAWRTFLSLLEYKCEREGTHFVAVNPRGTTKACASCGVSTDKPLWVREHSCPACGFEADRDANAAWNILSRGLEDVGVGYSESTPVETALPVDTPVSAKRVVEAGSPTLKERTASTVSE

SEQ ID NO: 4270 - protein, 422 aa, unidentified
MNYNYRYRLKPTEDQRETLDYHRDTCRQLYNHALYRFNQIPEDEGTVNQRVRKIRDELPDLKDWWDPLTDVYSKVLQPTVMRLAKNIKALGKLKEQGYKVGGLRWKSPREFRSFTYNQSGFELDKKSGQTVLSLSKLADIHIELHRPLPDDATVKEVTLKKEKTGEWFAIFGIEMDTEPPAKPPLENIDTDEMVGIDVGILKYTHDTDGTAVESLDLSEERDRLEREQRKLSRKEHGSNNWENQRRRVAECYLDIKRKRRDFLHKLSNYYAREYELVAVEDLNVKGMLDSLRNSRNTASAAWNTFASMLEYKCEREGTHFVEVDPDGTTKECAQCGVETDKPLWVRDHSCPACGFEADRDVNAAWNILSRGLTDLGVGHSEETPVETALPAGTTPVPAKRVVEAGSPCLKERAATPRVSRQG

SEQ ID NO: 4271 - protein, 407 aa, unidentified
MTTPVKPGGAGRARYTYRLRVSSTARTALLAEWDRCRWIWNECVAKSRAVHAHNRAHPDGRLTCGPAQLDRMLTGARERTPWLREGASVPQQQIVRDFAKSRSKALKDIDKRLPMRQRAGMPRRKKKREALPTLNYTTRGFRLKDGRLHLAGGIALTVVWSRELPSAPSSVRVHRDALGHWYASFVVPAATEALPTTGRVIGVDWGVKEAATTTSDAHDLPHAQHGKTAAQRLAHYQRMMARRRPAKGQAASKGYREAQRQTAKLHKKVARQRQDTARKWAKRVVTDHDAIAVEDFRPKFLARTTMARKAADAAIGATKQALIEMGRKHRRDIRLVNPAHTTMDCAQCGARTKHALPLSERTYTCTACGAVSPRDKNSARVMLVRAGLNPAGAEGTRPPGALLPEAA

SEQ ID NO: 4272 - protein, 360 aa, unidentified
MRVAFVYRLYPTREQKRTIHFTLERCRLLYNRLLEERILAYKTEGKILNYYDQANTFNERKQHIPTLKQVHSQVLQDVAKRLDKAFQAFFRRVKNGETPGFPRFKPQQRYDSFTYPQGGHAIKDNKVRFSKIGDVKIKLHRQPQGKIKTCTITVKNGRYYACFSCEVDPQQLPVSEEKVGIDLGLLHLAVTSDGTMVEAPKQLRRNECRLKQLQRFVTRKKCGSKRRKKAVHILAKLHEKVANQRKDHAHKVSRQLVDRYGFIAFEQLNVQGMVKNRHLSKSIADAGWSQLIQFAKYKAESAGRVVVQVDPRHTSQLCSNCGTTVKKTLSVRVHRCDHCSYTADRDENAARNILQRALAL

SEQ ID NO: 4273 - protein, 340 aa, unidentified
MKTLKLRIKDKHCKVLDQLAAEVNFVWNYVNDLSFNHLQRTGSFFSAFDMAKYTKGTSKLCGLHSQTVDAIREEYAGKRKQFKKAKLKWRVSNKKSAINYADGYVRYGKQKFNLWDSYGIGKYSVKTGSFVEDSRGRWYVCLVVESPKQDKPTSTKAIGIDLGLKDIATCSDGTVISNPKFYRKYEQKLGIAQRAKNKKRVRALHAKIANCRKDHLHKASTMLIKNNALIVVGDLSAKKLVKTKMAKSVLDTGFSALKTMLKYKCENAGVLFEEVNEAYTTQMCSYCGEITASSPKGRADLRIREWKCVNCGTAHDRDKNSALNILALGHERLAVGIPVF

SEQ ID NO: 4274 - protein, 432 aa, unidentified
MAEQVKEAPAELIQTRVYELRPNKTMRKVLDEACDYRRYCWNQGLALWNEMYKARQTLKSSLSTDSKKLTEEQKVLLKEKPSPSERRVRNMLVADKKDWQYTQSARILQLAISDLGKAWNNFFDKAQPGWGKPKFRSKREARQGFKSDQSKIKDGILYLERAKESSVPKDQWRGFKLSEKPLSDEFGVVSYFKEKGRYYVAIPYKIKAEDIKLPDKTGKATAVDVNVGHFDYTGGRMNVLPKKLDKIYGKIKHYQRQLAKKQVKNGEAACESENYLKTKAKLQACYRKASNIQNDLMQKFTTELVNNYDKIVIENLSVKGMLMSHVASKGVHRSMFGKFKQFLTYKCDWYGKELILANKLYPSTQRCAACGNVKKGDDKITLYGNKKHGTKHNEYVCYNQKCPNYNKVVDRDKNAMLSLLALTEHPELNHAL

SEQ ID NO: 4275 - protein, 428 aa, unidentified
MKTAKAEKIKKTLKETRERRENQVCRVYQLKLQNLSKKDIEKLDRLFLEAKWLRNFVVADIENRTKDYKYKEVEIKTPDGFEKREIKTLSSQMKQEIIDQIKDDLKNLKKSKENGNKVGKLKFKSEARTIPLKQYGVTYKISGDKNRVKIQGIKKKFRVLGLHQIPENAEITKGYLIKRPSGFYLHVVCYLPKEEVLKEIEEKKIPQPVGIDLGIKHQLTLSNGEKFNWYIPETKRLKRLQKTLSKKEKGSKNYQKIKHLIKREWEYISNKRKDIHNKVISYLKRFSLIAIQNDSIKSWKDGLFGKQIQNTGIGGITARLRNLATLIPVLFVDRYEATTQTCSFCGHRQEILLSERTFKCESCGREIDRDVNSAKNILKTAIEQLLWMVKVVERIGEGKLLKTLPVGGGEVTPVERELSLVEAGSLPL

SEQ ID NO: 4276 - protein, 402 aa, unidentified
MGVGEGSRVRYTYPVRVSLTARVALEAEWARCRWVWNECVAKSKQVQERGRRTGVKETCGPAGLDRMLTEARRVMPWLREGSSVPQQQMIRDFGKARAKALKDIADRLPVNRRAGMPKLKKKRDTSLSLNYTTRGFQLRDGRLHLAKGIALTVVWSRELPSRPSSVRVYRDSLGHWYASFVVATSAEVLPATGAVIGIDWGVAETATTTSDAHDLPHAEFGSRAAQRLARYQRQMARRKPKHGQPSSRGYKESQRQAAKAHKKVARQRQDTGRKWAKRVVTDHDVIAVEDFKPTFLTKTTMARKAADAAIGATKAALVAMARKHGRDLRLINPAHTTMDCAQCGTRAKHRLPLSERTYTCTACGASSPRDKNSARVMLVRAGLNPAGAEGVRPVGALLPQAA

SEQ ID NO: 4277 - protein, 407 aa, unidentified
MTTVNRRAEDVGRARYTYRLRVSSTARAGLDAEWARCRWVWNECVAMSRKVHGLNKDVADKVTCGPAQLDRMLTEARTAMGWLREGSSVPQQQIIRDFGTSRAKALKDIKAGLPMRQRAGMPRIKRKRDALPSMNYTRRGFRLKDGRLHLAGGIVLTVVWSRGLPTDPTSVRVYRDSLGHWYASFVVATAIEPLPATGRAIGIDWGVKETATTTSDAHDLPHAQHGKTAAQKLARYQKQMARRKPARGKAASKGYRAASRAAAKVHKKVARQRQDTGRKWAKAVVRDFDQLAVEDFKPKFLAKSTMARKAADAAIGATRTALTEMARKHGRIVHLVHPAHTTMDCSECGARTKHALPLSERTYACTTCGAVSPRDKNSARVMLVRAGLTPAGTDGGRPSGAPLPKAA

SEQ ID NO: 4278 - protein, 709 aa, unidentified
MTVEISEFMADALVQPGPDRRVFAIGDVHGQHDAFLDVLKAMTAAASECEEHTEFVQLGDLIDRGPYSLCCIDEMMKSAAELGFDDKTVLMANHEQIARIVMDVDAGKADLWIENGAKAIFRECGVPDDARRRFSASQKARAMRDFWGKDRLEFLRSLEPHRQIGNLLFVHAGLNPNVPKDEFLALPWDYTFQPNILGDRENHWAWIRFPFLNHISGWGGDLIVHGHTPEPRVIAYEREDPRMAHRIRYDRLDLDGGAGMGEPVAVAGAEFIRVARETRPFRAGRKARWPRSLEFSVSDYFPRMISNRAYRYRLKPTEEQAAQMRQFSGVVRLVYNLALEQRRDWWRQYVARTGKSLTYVVQARELTELRRSFDWIAAVSQTSQQQALRDLDRAYANFFAGRSGYPSPRRRGVHDGFRFQGRECRVRRLNRNWGAIHLPKIGPVRFRWTRDIAGAVKNVTVSRDPLGWHVSIACEVEIEAPEKPPLKALGIDRGVVHTLAFSDGRFADLPLERLRVLDRRARKQARSLARCRRGSKRREKAKARLARTRAKTARVRKHWVHERTAGLARSCGTVVIEDLRVRNMTASARGTVEAPGTNVRQKAGLNRSILEQGWFFFETCLRYKLEAAGGTLIKVPASYTSRTCFACGSISKHHRKSQAVFLCSDCGYSAHADTNAARNILKAGTRPSGRVPVAGPSNRESRQIAQTAA

SEQ ID NO: 4279 - protein, 412 aa, unidentified
MRQFAGVVRLVYNLALEQRRDWWRHYRRQTGNRLNYIAQARELTALRAAFDWIAAVHVTPQQQALRDLDKAYANFLAGRAGYPSRRKKGVNRAFRFQGREIEVKRLNGKWSAARLPKIGWVKFRDTRLLRGKTMNVTVSLAANGWHIVFACEIDHAVPQNDLPAVGIDRGVANTLTLSTGEHWWMPAGLAEIERRKRRAQRVLARRKRGSRRHAKARRRVAALQARAARIRQDWRHKASLAIARRFATVVLEDLATRNMTRSARGTVDAPGTNVCQKAGLNRAILEQGWHGFETVLAYKLEERGGYLCKVDPRHTSQTCSACAAVDRQSRESQASFRCCQCGLRAHADHNAAINILRRNTASMIVEEGQRLSVEAITIGGASRPLGNPPLQAGEDVNHHCQTTIGVLFGTRS

SEQ ID NO: 4280 - protein, 353 aa, unidentified
MKTLKLRIKDKHCKVLDQLASEVNFVWNYVNDLGFRHLKRKGEFLSAFDIAKYTKGTSKECNLHSQTIQAVTEELVTRRKQFKKAKLKWRVSNKKSARRSLGWVPFKKVAIKYANGYVQYGKHQFKLWDSYGLSKYTLKTGSFVEDSRGRWYVCLVVESPKQDKSTATKSIGIDLGLKDIATCSDGTVISNPKFYRKYEQKLCIAQRARNKKRVRALHAKIANSRKDHLHKASTKLVNENALIIVGDLSAKKLVKTKMAKSVLDTGFSALKTMLKYKCENAGVLFEEVQEAYTTQICSCCGEITSSSPKGRTDLGIREWECMSCGTAHDRDINSALNILALGHKRLAVGITLF

SEQ ID NO: 4281 - protein, 353 aa, unidentified
MKTLKLRIKDKHCKVLDQLASEVNFVWNYVNDLGFRHLKRKGEFLFAFDIAKYTKGTSKECNLHSQTIQAVTEELVTRRKQFKKAKLKWRVSNKKSARRSLGWVPFKKVAIKYANGYVQYGKHQFKLWDSYGLSKYTVKTGSFVEDSRGRWYVCLVVESPKQDKSTATKAIGIDLGLKDIATCSDGTVISNPKFYRKYEQKLGIAQRARNKKRVRALHAKIANSRKDHLHKASTKLVNENALIIVGDLSAKKLVKTKMAKSVLDTGFSALKTMLKYKCENAGVLFEEVQEAYTTQICSCCGEITSSSPKGRTDLGIREWECMSCGTAHDRDINSALNILALGHKRLAVGITLF

SEQ ID NO: 4282 - protein, 386 aa, unidentified
MTIKTQVVKLKVNKTMQKHLDALCDYRRYCWNKGLETWQLMYEAHTLNKKDNPSPNERRVRDELVANKADWQYDLSARCLQLAIKDLANAWKNFFDKSQPDWGIPSFKSKKAPRQGFKTDRAKIVNGKLRLDRPRSISKESWFDLKSYEALKMDEVKVVSVFKEKDNYYAALPYEEEIELKAKTQQKTAVDVNVGHFNYTEGQINILPAKLQKLYKRIKHYQRMLARKREVNGKLATKSNNYFAVRTKLQRDYRKAANIQKDLLQKFTTKLVNNYDQIVIEDLAVKEMMMTHVASKGMQRSLFSKFRRILTYKCDWYGKELILANKTYPSTQRCAACGYGKKGEEKITLQGNKKHGTKHNEYVCYECGYKNDRDENAVLNLLALAK

SEQ ID NO: 4283 - protein, 404 aa, unidentified
MLHRGYKFRLYATDEQAAVFGQFAGVCRLVYNLALEQRRDWWWQAKANTGYSISYASQCRELTKLRAEFDWIAAVSVTCQEQALRDLDKAYSNFFAGRSGYPTPRKRGLNDAFRFKGRECPWRKLNAKWAVVKLPKIGDVKFRLTRDIPGAIKNVTVTLDALGWHVVFSTEVERAAAPNFGPAVGIDRGVVHTVALSDGRFMDMPRERLNVLDRRARKQARKLAKCKRGSSRRNTAKKLLASTKAKMARVRLHWNHERTAEIARTHGVVVLEALKARNMTASAAGTADAPGRNVRQKAGLNRAILNNAWYQFEEFLAYKLAERGGELRKVNPAFTSQACSCCGTIDKASRESQATFKCGHCGHTANADTNAARNILMAGTQPALRTSVGEPLKRKPMAAAYPPL

SEQ ID NO: 4284 - protein, 388 aa, unidentified
MLKSYKTEIKPTLEQIQMINKTIGTCRFVYNFFLAHNKEVYEKEKKFVSGMDFSKWLNNIYIKENPEYSWIKEVSSKSVKQSIMNADRAFKRFFKGQSRFPNFKKKGKSDVKMYFVKTDAKVIIPCERHRIKIPTIGWVRIKEKGYIPTNPSTHIIKSGTVSCKAGRYYVSVLIEEQENPQSELNDFGIGIDLGVKDFAITSNGITKKNINKSSRLKKLEKQLKREQRCLSRKYEDYKKRSKKGEATRQNIQKQIAKVQKLHQRINTIRTDYINKSVNEIVKTKPSYITIEDLNVSGMMKNRHLSKAVASQKFYEFRTKLEAKCKETGIELRVVDRWYPSSKLCHECGCIKKDLKLSDREYICECGYRADRDYNASLNLRDAITYKIA

SEQ ID NO: 4285 - protein, 368 aa, unidentified
MISYRTEIKPNKQQIYEINKTINACRSVYNKFIEVNKLRYNNGLKFLNHRKFSVWYNNDFIPNNEDKKWTKEVNTKATKQAMANAENAYNRFWKYNNRYPNFKKKQSNGSYYLIGTIKVERHRIQLPNLKWVKLKEKGYIPKNNVKSVTIIKENDRYFVSVLVDEEHKPVFKKPQTEGIGIDLGLKDTLFTPKGVHITDLRKNKRLVKLNNSLKRQQRKLSRKQKKSNNWFKQLLKVQRLYRKISNLKKDIKQKKVLEIVKENPQFITIEDLNIKGMMKNKKLSNSFQQIGLGYIVEWFKWKCYQYGIELRQVNRFYPSSQICNSCSHRQKMPLDKRIYKCENCGMIEDRDINASINLKQAKDYTVIV

SEQ ID NO: 4286 - protein, 400 aa, unidentified
MQNRGYKFRLYATAEQETMFGQYAGVCRLVYNLGLEQRRDWWRQFKANTGIAISYPSQARELTALRAEFDWIAAVSIICQQQALRDLDKAFGNFFAGRADYPTPRKRGMNDAFRFSGRDCQWRKLNAKWAVVKLPKIGEVKFRLTRDIPGTVKNVTVTSDALGWHVVFSTEVEHTAPPNFGPAIGIDRGVVHTIALSDGTFRNMPKEQLNLLDRRARKQARKLARCKRGSNRRHAARKILARTKAKIARIRLHWNHERTTEIAAMHSVVVLEALKTKSMTASAAGTVDEPGRKVRQKAGLNRAILNNAWHQFETLLSYKIAERGGELRKVNPAYTSQCCAECGTIDKVSRENQATFRCGHCGHTAHADTNAARNILRAGTQPALRSSVRKPLRRELKRAA

SEQ ID NO: 4287 - protein, 407 aa, unidentified
MATLRKGSGDAGHVRYTYRLRMSSTARTALRAEWDRCRWVWNECVAKSRQVHVHNRQHPEKQTCGPAQLDKMLTEARAKTPWLCEGASVPQQQTIRDFAKARSKALKDIEKRLPVWQRAGMPRPKKKREALPTLNYTTQGFRLKDGRLHLAGGIVVTVVWSRELPSAPSSVRVYRDSLGHWYASFVVAAETRPLPATGRVIGVDWGVKETATTTSDDHDLPHVQHGKTAAQRLARYQRMMGRRKPARGQAASRGYREARRQAAKMHKKVARRRQDTARKWAKKVVRDHDAIAVEDFRPKFLARTTMARKAADAAISTTKTTLIEMGRKHGRDVRLVYPAHTTMDCASCGARTKHALPLSERTYTCTACGVMSPRDKNSARVMLVRAGLIPAGAEGVRPPGALLPEGA

SEQ ID NO: 4288 - protein, 369 aa, unidentified
MLRAYKVEIKPNQEQINTINQTIGTCRWVYNKFIEVNQLRYKSNLNYMSGYNFSKWLNNEFIPNKPDKYWIKESASKAVKQSIIYAHNAYQDAFKKKKGFPRFKKKQSSGSYYLIGTIHVERHRVQLPKLKWVKLKEKGYIPPNNIKSATISKEFDRYYVSVLVEEKPKEIFKSLKTEGIGIDLGLKDTLFTSKGVHITDLRKNQKLIRLNKSLKRQQRKLARKQKKSNNWFKQLLKVQRLYRKISNIKKDTKRKKVLEIVKENPQFITIENLNVKGMMKNKRLSNSFQQIGLGYIVEWLKHKCQEYGIELRQVDRFYPSSQICNQCGSRQKMPLNKRIYKCENCGTIEDRDINASINLKQAKDYTILV

SEQ ID NO: 4289 - protein, 427 aa, unidentified
MNKNETIKATLKATRAKRKNQTCKVYEIKLDKSHLNNATKTHLNRLFIEAKWFYNHILAQHKIFGMDDNVHQVPVKVKDIFEIRDLQCLSAQMRQSILSRTQDNIRGLAERKKKGYKIGKLKYKSLIQSIPLKQYGNTYKILNTKYIRVQGIKQKLKVIGLKQIPVDSDIANGTLIHKNGDYYLSITTYQEKGKTKQVHANKSVGIDFGLNRQLMLSRTGIAIQYSIPISPKLRRIARTLSKQKLHSKNWNKTRIKLNKEYDKTTNIKEDIKNKVVSFLKNNYETVCVQDESLKAWQRIWGRKILSTSIGGIISTLKKKVHTLIEVPKNFPSTKTCSKCGNIQEIALDERVYICKNKNCNNILDRDHNSADNMENEGLKQVGTVRTELTPVEIEANTSMFLRYLNNIPYIRASSVYESGSSRLLAGE

SEQ ID NO: 4290 - protein, 353 aa, unidentified
MKTLKLRIKDKHCKVLDQLASEVNFVWNYVNDLGFRHLKRKGEFLSAFDIAKYTKGTSKECNLHSQTIQAVTEELVTRRKQFKKAKLKWRISNKKSARRSLGWVPFKKVAIKYATGYVQYGKHQFKLWDSYGLSKYTLKTGSFVEDSRGRWYVCLVVESPKQDKSTATKAIGIDLGLKDIATCSDGTVISNPKFYRKYEQTLGIAQRARNKKRVRALHAKIANSRKDHLHKASTKLVNENALIIVGDLSAKKLVKTKMAKSVLDTGFSALKTMLKYKCENAGVLFEEVQEAYTTQICSCCGEITSSSPKGSTDLGIREWECMSCGTAHDRDINSALNILALGHKRLAVGITLF

SEQ ID NO: 4291 - protein, 368 aa, unidentified
MIRYKTEIKPNKKQIKEINKTINACKFVYNKFIEINKIRYDNGLKFLNHMKFSVWYNNEFIPNNKDKNWTKEVSTKATKQAMANAENSYVRFWNKTSGCPNFKKKQSNGSYYLIGKIKVERHRIKLPNLKWVKLKEKGYIPNKNIKSATVIKENDRYFISVLVDEEPKIIFKKPQTEGIGIDLGLKDTLFTPSGVKITDLRKNKKLIKLNKSLKRQQRKLSRKQKKSNNWFKQLIKVQRLYRKISNLKKDIKRKSILSIVKENPQYITIENLNIKGMMKNRKLSNAFQQVGLGYIVDWLKWKCYEYGIELRQVDRFYPSSQLCNQCGNRQKMPLNKRVYKCENCGTIEDRDINASINLKQAKEYTVLV

SEQ ID NO: 4292 - protein, 368 aa, unidentified
MIRYKTEIKPNKKQLEEINKTISACKFVYNKFIEINKIRYNNGLKFLNHMKFSVWYNNEFIPNNEDKKWTKEVSTKATKQAMANAENSYARFWNKTSGYPNFKKKRSSGSYYLIGAIKVERHRIKLPNLKWVKLKEKGYIPNKDIKSATVIKENDKYFVSVLVDEEPKPVFKKPQSEGIGIDLGLKDTLFTPSGVKITDLRKNKRLIKLNKSLKRQQRRLSRKQKKSNNWFKQLLKVQRLYRKISNLKKDIKRKSILSIVQENPQYITIENLNIKGMMKNKRLSNAFQQIGLGYIIDWLKWKCYQYGIELRQVDRFYPSSQICNKCGNRQKMTLNKRVYKCENCGTIEDRDINASINLKQAKEYTVLV

SEQ ID NO: 4293 - protein, 308 aa, unidentified
MEAVKTLKLRIKDKHAGVQVGSATVQLVCEEYATRRKQFKKSRLNWRVSNPKSAKHSLGWVPFKAGGAKYKAGQIAFLGYKFGLWDSYGLSRFDLRAGSFSQDARGRWYLNVCVKVGVPKSEGVGSVGIDLGLKTAATCSDGEELASGLYRKHEGALGIAQRAGKKNRVRAIHAKIANTRKDAMHKFSTGLVARNAAIFVGNVQAGAMVKTTMAKSTLDAGWSMLKTMLEYKSHQAGIVFEEVNEAYTTQTCSGCGVIPASSPKGRTGLRMRRWTCCECGAEHHRDVNAARNIAARGHARRAGGIPVL

SEQ ID NO: 4294 - protein, 420 aa, unidentified
MNYNYRYRLKPTENQRETLDYHRNTCRQLYNHALYRFNQIPESEGTVKQRVRKIRDELPDLKDWWDALIDVYSKVLQPTVMRLAKNIRALGKLKERGYNVGELRWKSPREFRSFTYNQSGFELDKKGGQTVLSLSKLADIPIELHRPIPDDATVKEVTLKKEKTGEWFAIFGIETDTEPPAKPSLENIDAGKMVGIDVGILTYAHDTDGTAVESLDLSVERDRLEREQRKLSRKEHGSNNWKSQRQRVAEYHLQIKRKRHDFLHRLSNYYARKYDLVAVEDLNVKGMMESPSDSRNTASAAWRTFLSLLEYKCEREGTHFVAVNPRGTTKECARCGVETDKPLWVREHSCPSCGFEADRDANAAWNILSRGLSELGVGHSEGTPVKTALPTDTNSVSAKCVLEAGSPCLKEPPKAASRQG

SEQ ID NO: 4295 - protein, 353 aa, unidentified
MKTLKLRIKDKHCKVLDQLASEVNFVWNYVNDLGFRHLKRKGEFLSAFDIAKYTKGTSKECNLHSQTIQAVTEELVTRRKQFKKAKLKWRISNKKSARRSLGWVPFKKLAIKYATGYVQYGKHQFKLWDSYGLSKYTLKTGSFVEDSRGRWYVCLVVESPKQDKSTATKSIGIDLGLKDIATCSDGTVISNPKFYRKYEQKLCIAQRARNKKRVRALHAKIANSRKDHLHKASTKLVNENALIIVGDLSAKKLVKTKMAKSVLDTGFSALKTMLKYKCENAGVLFEEVQEAYTTQICSCCSEITSSSPKGSTDLGIREWECMSCGTAHDRDINSALNILALGHKRLAVGITLF

SEQ ID NO: 4296 - protein, 353 aa, unidentified
MKTLKLRIKDKHCKVLDQLASEVNFVWNYVNDLGFRHLKRKGEFLSAFDIAKYTKGTSKECNLHSQTIQAVTEELVTRRKQFKKAKLKWRVSNKKSARRSLGWVPFKKLAIKYANGYVQYGKHQFKLWDSYGLSKYTLKTGSFVEDSRGRWYVCLVVESPKQDKSTATKAIGIDLGLKDIATCSDGTVISNPKFYRKYEQKLCIAQRARNKKRVRALHAKIANSRKDHLHKASTKLVNENALIIVGDLSAKKLVKTKMAKSVLDTGFSALKTMLKYKCENAGVLFEEVQEAYTTQICSCCGEITSSSPKGSTDLGIREWECMSCGTAHDRDINSALNILALGHKRLAVGITLF

SEQ ID NO: 4297 - protein, 353 aa, unidentified
MKTLKLRIKDKHCKVLDQLASEVNFVWNYVNDLGFRHLKRKGEFLSAFDIAKYTKGTSKECNLHSQTIQAVTEELVTRRKQFKKAKLKWRVSNKKSARRSLGWVPFKKLAIKYATGYVQYGKHQFKLWDSYGLSKYTLKTGSFVEDSRGRWYVCLVVESPKQDKSTATKSIGIDLGLKDIATCSDGTVISNPKFYRKYEQTLGIAQRARNKKRVRALHAKIANSRKDHLHKASTKLVNKNALIIVGDLSAKKLVKTKMAKSVLDTGFSALKTMLKYKCENAGVLFEEVQEAYTTQICSCCGEITSSSPKGSTDLGIREWECMSCGTVHDRDINSALNILALGHKRLAVGITLF

SEQ ID NO: 4298 - protein, 353 aa, unidentified
MKTLKLRIKDKHCKVLDQLASEVNFVWNYVNDLGFRHLKRKGEFLSAFDIAKYTKGTSKECNLHSQTIQAVTEELVTRRKQFKKAKLKWRVSNKKSARRSLGWVPFKKVAIKYANGYVQYGKHQFKLWDSYGLSKYTLKTGSFVEDSRGRWYVCLVVESPKQDKSTATKAIGIDLGLKDIATCSDGTVISNPKFYRKYEQTLGIAQRARNKKRVRALHAKIANSRKDHLHKASTKLVNENALIIVGDLSAKKLVKTKMAKSVLDTGFSALKTMLKYKCENAGVLFEEVQEAYTTQICSCCGEITSSSPKGRTDLGIREWECMSCGTVHDRDINSALNILALGHKRLAVGITLF

SEQ ID NO: 4299 - protein, 353 aa, unidentified
MKTLKLRIKDKHCKVLDQLASEVNFVWNYVNDLGFRHLKRKGEFLSAFDIAKYTKGTSKECNLHSQTIQAVTEELVTRRKQFKKAKLKWRVSNKKSARRSLGWIPFKKVAIKYANGYVQYGKHQFKLWDSYGLSKYTLKTGSFVEDSRGRWYVCLVVESPKQDKSTATQAIGIDLGLKDIATCSDGTVISNPKFYRKYEQKLGIAQRARNKKRVRALHAKIANSRKDHLHKASTKLVNENALIIVGDLSAKKLVKTKMAKSVLDTGFSALKTMLKYKCENAGVLFEEVQEAYTTQLCSCCGEITSSSPKGSTDLGIREWECMSCGTAHDRDINSALNILALGHKRLAVGITLF

SEQ ID NO: 4300 - protein, 353 aa, unidentified
MKTLKLRIKDKHCKVLDQLASEVNFVWNYVNDLGFRHLKRKGEFLSAFDIAKYTKGTSKECNLHSQTIQAVTEELVTRRKQFKKAKLKWRVSNKKSARRSLGWVPFKKVAVKYTNGYVQYGKHQFKFWDSYGLSKYTLKTGSFVEDSRGRWYVCLVVESPKQDKSTATKAIGIDLGLKDIATCSDGTVISNPKFYRKYEQKLGIAQRARNKKRVRALHAKIANSRKDHLHKASTKLVNENALIIVGDLSAKKLVKTKMAKSILDTGFSALKTMLKYKCENAGVLFEEVQEAYTTQICSCCGEITSSSPKGKTDLGIREWECMSCGTAHDRDINSALNILALGHKRLAVGITLV

SEQ ID NO: 4301 - protein, 353 aa, unidentified
MKTLKLRIKDKHCKVLDQLASEVNFVWNYVNDLGFRHLKRKGEFLSAFDIAKYTKGTSKECNLHSQTIQAVTEELVTLRKQFKKAKLKWRVSNKKSARRSLGWVPFKKLAIKYANGYVQYGKHQFKLWDSYGLSKYTLKTGSFVEDSRGRWYVCLVVESPKQDKSTATKAIGIDLGLKDIATCSDGTVISNPKFYRKYEQKLGIAQRARNKKRVRALHAKIANSRKDHLHKASTKLVNENALIIAGDLSAKKLVKTKMAKSVLDTGFSALKTMLKYKCENAGVLFEEVQEAYTTQICSCCGEITSSSPKGKTDLGIREWECMSCGTAHDRDINSALNILALGHKRLAVGITLV

SEQ ID NO: 4302 - protein, 353 aa, unidentified
MKTLKLRIKDKHCKVLDQLASEVNFVWNYVNDLGFRHLKRKGEFLSAFDIAKYTKGTSKECNLHSQTIQAVTEELVTRRKQFKKAKLKWRVSNKKSARRSLGWVPFKKVAIKYANGYVQYGKHQFKLWDSYGLSKYTLKTGSFVEDSRGRWYVCLVVESPKQDKSTATKAIGIDLGLKDIATCSDGTVISNPKFYRKYEQKLGIAQRAKNKKRVRALHAKIANSRKDHLHKASTKLVNENALIIVGDLSAKKLVKTKMAKSVLDTGFSALKTMLKYKCENAGVLFEEVQEAYTTQICSCCGEITSSSPKGRTDLGIREWECMSCGTAHDRDINSALNILALGHKRLAVGITLF

SEQ ID NO: 4303 - protein, 294 aa, unidentified
MKTLKLRIKDKHCKVLDQLASEVNFVWNYVNDLCFKHLQRKQQFFSAYDIAKYTKGASKECSLHSQTIQAVTEELVTKTGPFVEDSRGRWYVCLVVDSPKQNKPTATKAVGIDLGLKDIATCSDGMIISNPKFYRKYEQKLGIAQRARNKKRVRALHAKIANCRKDHLHKASTQLVKDNALIVVGDLSANKLVKTKMAKSVLDTGFSALKTMLKYKCENAGVMFEEVNERFTTQTCSSCGTITASSPKDRADLRIRVWECECGSVNQRDLNSAKNILALGHKRLAVGISLLSGG

SEQ ID NO: 4304 - protein, 353 aa, unidentified
MKTLKLRIKDKHRKVLDQLASEVNFVWNYVNDLGFRHLKRKGEFLSAFDIAKYTKGTSKECNLHSQTIQAVTEELVTRRKQFKKAKLKWRVSNKKSARRSLGWVPFKKVAVKYANGYVQYGKHQFKLWDSYGLSKYTLKTGSFVEDSRGRWYVCLVVESPKQDKSTATKAIGIDLGLKDIATCSDGTVISNPKFYRKYEQKLGIAQRARNKKRVRALHAKIANSRKDHLHKASTKLVNENALIIVGDLSAKKLVKTKMAKSVLDTGFSALKTMLKYKCDNAGVLFEEVQEAYTTQICSCCGEITSSSPKGRTDLGIREWECMSCGTAHDRDINSALNILALGHKRLAVGITLF

SEQ ID NO: 4305 - protein, 353 aa, unidentified
MKTLKLRIKDKHCKVLDQLASEVNFVWNYVNDLGFRHLKRKGEFLSAFDIAKYTKGTSKECNLHSQTIQAVTEELVTRRKQFKKAKLKWRVSNKKSARRSLGWVPFKKVAIKYANGYVQYGKHQFKLWDSYGLSKYTLKTGSFVEDSRGRWYVCLVVESPKQDKSTATKAIGIDLGLKDIATCSDGTVISNPKFYRKYEQKLGIAQRARNKKRVRALHAKIANSRKDHLHKASTKLVNENALIIVGDLSAKKLVKTKMAKSVLDTGFSALKTMLKYKCENAGVLFEEVQEAYTTQICSCCGEITSSSPKGKTDLGIREWECMSCGTAHDRDINSALNILALGHKRLAVGITLF

SEQ ID NO: 4306 - protein, 353 aa, unidentified
MKTLKLRIKDKHCKVLDQLASEVNFVWNYVNDLGFRHLKRKGEFLSAFDIAKYTKGTSKECNLHSQTIQAVTEELVTRRKQFKKAKLKWRVSNKKSARRSLGWVPFKKLAIKYANGYVQYGKHQFKLWDSYGLSKYTLKTGSFVEDSRGRWYVCLVVESPKQDKSTATKSIGIDLGLKDIATCSDGTVISNPKFYRKYEQKLCIAQRARNKKRVRALHAKIANSRKDHLHKASTKLVNENALIIVGDLSAKKLVKTKMAKSVLDTGFSALKTMLKYKCENAGVLFEEVQEAYTTQICSCCGEITSSSPKGRTDLGIREWEYMSCGTVHDRDINSALNILALGHKRLAVGITLF

SEQ ID NO: 4307 - protein, 353 aa, unidentified
MKTLKLRIKDKHCKVLDQLASEVNFVWNYVNDLGFRHLKRKGEFLSAFDMAKYTKGTSKECNLHSQTIQAVTEELVTRRKQFKKAKLKWRVSNKKSARRSLGWVPFKKVAIKYANGYVQYGKHQFKLWDSYGLSKYTLKTGSFVEDSRGRWYVCLVVESPKQDKSTATKAIGIDLGLKDIATCSDGTVISNPKFYRKYEQKLGIAQRARNKKRVRALHAKIANSRKDHLHKASTKLVNENALIIAGDLSAKKLVKTKMAKSVLDTGFSALKTMLKYKCENAGVLFEEVQEAYTTQICSCCGEITSSSPKGKTDLGIREWECMSCGTAHDRDINSALNILALGHKRLAVGITLV

SEQ ID NO: 4308 - protein, 353 aa, unidentified
MKTLKLRIKDKHCKVLDQLASEVNFVWNYVNDLGFRHLKRKGEFLSAFDIAKYTKGTSKECNLHSQTIQAVTEELVTRRKQFKKAKLKWRVSNKKSARRSLGWIPFKKVAIKYANGYVQYGKHQFKLWDSYGLSKYTLKTGSFVEDSRGRWYVCLVVESPKQDKSTATKAIGIDLGLKDIATCSDGTVISNPKFYRKYEQKLGIAQRARNKKRVRTLHAKIANSRKDHLHKASTKLVNENVLIIAGDLSAKKLVKTKMAKSVLDTGFSALKTMLKYKCENAGVLFEEVQEAYTTQICSCCGEITSSSPKGKTDLGIREWECMSCGTAHDRDINSALNILALGHKRLAVGITLV

SEQ ID NO: 4309 - protein, 353 aa, unidentified
MKTLKLRIKDKHCKVLDQLASEVNFVWNYVNDLGFRHLKRKGEFLSAFDIAKYTKGTSKECNLHSQTIQAVTEELVTRRKQFKKAKLKWRVSNKKSARRSLGWVPFKKVAIKYANGYVQYGKHQFKLWDSYGLSKYTLKTGSFVEDSRGRWYVCLVVESPKQDKSTATKAIGIDLGLKDIATCSDGTVISNPKFYRKYEQKLGIAQRARNKKRVRALHAKIANSRKDHLHKASTKLVNENALIIVGDLSAKKLVKTKMAKSVLDTGFSALKTMLKYKCENAGVLFEEVQEAYTTQICSCCGEITSSSPKGRTDLGIREWECMSCGTAHDRDINSALNILALGHKRLAVGITLF

SEQ ID NO: 4310 - protein, 353 aa, unidentified
MKTLKLRIKDKHCKVLDQLASEVNFVWNYVNDLGFRHLKRKGEFLSAFDIAKYTKGTSKECNLHSQTIQAVTEELVTRRKQFKKAKLKWRVSNKKSARRSLGWVPFKKLAIKYATGYVQYGKHQFKLWDSYGLSKYTLKTGSFVEDSRGRWYVCLVVESPKQDKSTATKAIGIDLGLKDIATCSDGTVISNPKFYRKYEQTLGIAQRARNKKRVRALHAKIANSRKDHLHKASTKLVNENALIIVGDLSAKKLVKTKMAKTVLDTGFSALKTMLKYKCENAGVLFEEVQEAYTTQICSCCGEITSSSPKGSTDLGIREWECMSCGTVHDRDINSALNILALGHKRLAVGITLF

SEQ ID NO: 4311 - protein, 353 aa, unidentified
MKTLKLRIKDKHCKVLDQLASEVNFVWNYVNDLGFRHLKRKGEFLSAFDIAKYTKGTSKECNLHSQTIQAVTEELVTRRKQFKKAKLKWRVSNKKSARRSLGWVPFKKVAIKYATGYVQYGKHQFKLWDSYGLSKYTLKTGSFVEDSRGRWYVCLVVESPKQDKSTATKAIGIDLGLKDIATCSDGTVISNPKFYRKYEQTLGIAQRARNKKRVRALHAKIANSRKDHLHKASTKLVNENALIIVGDLSAKKLVKTKMAKTVLDTGFSALKTMLKYKCENAGVLFEEVQEAYTTKICSCCGEITSSSPKGSTDLGIREWECMSCGTAHDRDINSALNILALGHKRLAVGITLF

SEQ ID NO: 4312 - protein, 353 aa, unidentified
MKTLKLRIKDKHCKVLDQLASEVNFVWNYVNDLGFRHLKRKGEFLSAFDIAKYTKGTSKECNLHSQTIQAVTEELVTRRKQFKKAKLKWRVSNKKSARRSLGWVPFKKVAIKYANGYVQYGKHQFKLWDSYGLSKYTLKTGSFVEDSRGRWYVCLVVESPKQDKSTATKAIGIDLGLKDIATCSDGTVISNPKFYRKYEQKLGIAQRARNKKRVSALHAKIANSRKDHLHKASTKLVNENALIIVGDLSAKKLVKTKMAKSVLDTGFSALKTMLKYKCENAGVLFEEVQEAYTTQICSCCGEITSSSPKGKTDLGIREWECMSCGTAHDRDINSALNILALGHKRLAVGITLF

SEQ ID NO: 4313 - protein, 353 aa, unidentified
MKTLKLRIKDKHCKVLDQLASEVNFVWNYVNDLGFRHLKRKGEFLSAFDIAKYTKGTSKECNLHSQTIQAVTEELVTRRKQFKKAKLKWRVSNKKSARRSLGWIPFKKVAIKYANGYVQYGKHQFKLWDSYGLSKYTLKTGSFVEDSRGRWYVCLVVESPKQDKSTATKAIGIDLGLKDIATCSDGTVISNPKFYRKYEQKLGIAQRARNKKRVRALHAKIANSRKDHLHKASTKLVNENALIIVGDLSAKKLVKTKMAKSVLDTGFSALKTMLKYKCENAGVLFEEVQEAYTTQICSCCGEITSSSPKGKTDLGIREWECMSCGTAHDRDINSALNILALGHKRLAVGITLF

SEQ ID NO: 4314 - protein, 353 aa, unidentified
MKTLKLRIKDKHCKVLDQLASEVNFVWNYVNDLGFRHLKRKGEFLSAFDIAKYTKGTSKECNLHSQTIQAVTEELVTRRKQFKKAKLKWCVSNKKSARRSLGWVPFKKLAIKYANGYVQYGKHQFKLWDSYGLSKYTLKTGSFVEDSRGRWYVCLVVESPKQDKSTATKAIGIDLGLKDIATCSDGTVISNPKFYRKYEQTLGIAQRARNKKRVRALHAKIANSRKDHLHKASTKLVNENALIIVGDLSAKKLVKTKMAKSVLDTGFSALKTMLKYKCENAGVLFEEVQEAYTTQICSCCGEITSSSPKGSTDLGIREWECMSCGTAHDRDINSALNILALGHKRLAVGITLF

SEQ ID NO: 4315 - protein, 385 aa, unidentified
MIKTQVVKLKVNKTMQKYLDALCDYRRYCWNKGLETWQLMYEAYSLNKKDNPSPNERRVRDELVANKADWQYDLSARCLQLAVKDLANAWKNFFDKAQPDWGIPSFKSKKSPRQGFKTDRAKIVNGKLRLDRPRSISKESWFDLKSYEALKMDEVKVVSIFKEKESYYAALSYEEDMPAKAKTHQKTAVDVNVGHFNYTEGPINVLPAKLQKLYKRIKHYQRMLARKREVNGKLATKSNNYYAVRAKLQRDYRKVANIQNDLLQKFTAKLIDNYDQIVIEDLAVKEMMMMHVASKGMQRSLFSKFRQILTYKCDWYGKELILADKKYPSTQRCAQCGYVKKGEEKITLQGNKKHGTKHNEYVCYECGYKNDRDENAVLNLLALAK

SEQ ID NO: 4316 - protein, 386 aa, unidentified
MTIKTQVVKLKVNKTMQKHLDALCDYRRYCWNKGLETWQLMYEAHTLNQKDNPSPNERRVRDELVANKADWQYDLSARCLQLAIKDLANAWKNFFDKSQPDWGIPSFKSKKAPRQGFKTDRAKIVNGKLRLDRPRSISKEPWFDLKSYEALKMDEVKVVSVFKEKDNYYAALPYEEEIELKAKTQQKTAVDVNVGHFNYTEGQINILPAKLQKLYKRIKHYQRMLARKREVNGKLATKSNNYFAVRTKLQRDYRKAANIQNDLLQKFTTKLVNNYDQIVIEDLAVKEMMMTHVASKGMQRSLFSKFRRILTYKCDWYGKELISADKTYPSTQRCAACGYVKKGEEKITLQGNKKHGTKHNEYVCYECGYKNDRDENAVLNLLALAK

SEQ ID NO: 4317 - protein, 284 aa, unidentified
MYYAYKYRLNPSDAHRKELDRHRDICRQLYNHTLYRLNEYQDEHGELPSMTSLRSELPDLKKWWDGLSDVYSKVLQTVVERLFDNLNSLSKLKENGYGVGQLKWKPPREFRSFTYSQSGFKLDKKGGQTVLSLSKLADIPIRLHRPIPDDATLKQVTVKKEPTGEWFATFGVEMDRELPEPPENPEKCVGIDVGILKYAHDTDGTAVGSLDLSDERDRLEREQRKLSRKQHGSNNYEKQRRRVAECHADLRRKRRDFLHKLSAYYAREYDLVAVEDLNVKGMME

SEQ ID NO: 4318 - protein, 288 aa, unidentified
MIKTQVVKLKVNKTIQKHLDALCDYRRYCWNKGLETWQLMYEAHTLNKKDNPSPNERRVRDELVANKADWQYDLSARCLQLAIKDLANAWKNFFDKAQPDWGIPSFKSKKAPRQGFKTDRAKIVNGKLRLDRPRSISKADWFDLKSYEALKMNEVKVISIFKEKDSYYAALPYEEEISSKAKNHQKTAVDVNVGHFNYTDGKINVLPAKLQKLYKRIKHYQRMLARKREVNGKLATKSNNYFAVRTKLQRDYRKVANIQNDLLQQFTTKLVDNYDQIVIEDLAVKQMM

SEQ ID NO: 4319 - protein, 403 aa, unidentified
MLADGVGHARYTYRLRVSSTARTALEAEWGRCRWVWNECVAKSRQTHAHNKTRPGDKRTCGPAQLDKMLTEARAAMAWLREGASVPQQQTIRDFAKSRAKALKDTAKRLPMPRRAGMPRPKKKCEALPTLNYTKRGFRVKDGRLHLAGGIVLTVVWSRELPSDPSSVRVYRDSLGHWHASFVVAAQTQPLPATGTVIGIDWGVKETATTTSNAHDLPHAEHGKNAAQRLARYQRMMARRKPKRGQPASKGYRKAQKQTAKLHKKVARQRQDTARKWAKRVVRDHDAIAVEDFRPKFLAKTTMARKAADAAIGANKAALIEQARKHGRAVHLVDPAHTTMDCAHCGVRAKHRLPLSERTYTCTACGAVSPRDKNSARVMLVRAGLNPASAEGIRPAGALLPEAA

SEQ ID NO: 4320 - protein, 403 aa, unidentified
MLGDGVGHARYTYRLRVSSTARTALEAEWGRCRWVWNECVAKSRQTHSHNKTRPGDKRTCGPAQLDKMLTEARAAMAWLREGASVPQQQTIRDFAKSRAKALKDIAKRLPMPRRAGMPRPKKKCEALPTLNYTKRGFRVKDGRLHLAGGIVLTVVWSRELPSDPSSVRVYRDSLGHWHASFVVAAQTQPLPATGTVIGIDWGVKETATTTSNAHDLPHAEHGKNAAQRLARYQRMMARRKPKRGQPASKGYRKAQKQTAKLHKKVARQRQDTARKWAKRVVRDHDAIAVEDFRPKFLAKTTMARKAADAAIGANKAALIDQARKHGRAVHLVDPAHTTMDCAHCGVRAKHRLPLSERTYTCTACGAVSPRDKNSARVMLVRAGLNPASAEGVRPPGALLPEAA

SEQ ID NO: 4321 - protein, 406 aa, unidentified
MTTPSISGGAGHARYTYRLRLSSTARTGLETEWARCRWVWNECVAMSRKVHAANQGAVEKTTCGPAQLDKMLTEARNAMSWLREGASVPQQQTIRDFAKSRAKALKDIKAKLPLRQRAGMPRIKRKPDALPTLNYTTRGFRLKDGRLHVAGGIVLTVVWSRDLPAAPSSVRIYQDSLGHWYASFVVATEVQPLPRTSAVLGVDWGVTETATTTSDVHDLPHAEHGKNAAQRLARYQRMMARRRPAKGQPASRGYRKAQAQTAKLHKKVARQRQDTARKWAKRAVRNHDAIAVEDFHPKFLAKTTMARKAADAAISATKTALIEMGRKHGRDVRLVHPAHTTMDCAHCMTRAKHALPLSERTYTCTACEAVSPRDKNSARVMLVRAGLNPAGVEGVRPPGALLPEAA

SEQ ID NO: 4322 - protein, 397 aa, unidentified
MREAEGAGRVRYTYRLRVSSGARADLEAEWARCRWVWNESVARSKKAHADGEACGPARLDKMLTQARAVTPWLAAGSSVPQQQTVRDFAAARAKALKDIKDRLPARRRAGMPRHRKKHRARPTLNYTRRGFRLKDGRLHLAGGIVLTVVWSRPLPAEPSSVRVYRDRLGAWYASFVVPAQLQPLPATGRVLGVDWGVKETATTTSDAHDLPHPEYGRKAKERLCRYDRMMARRKPKKGQPASKGYREAKKWRAKTYQKIARQRQDTARKWAKKVVRDHDVIAVEDFRPRFLARTSMARKAADAAIGATKQALIEMGRKHARDVRLVHPAHTTMDCARCGARTKHVLPLSERTYTCTACGAVSPRDKNSARVMLLRAGLDPAGVEGARPPGALLQEAA

SEQ ID NO: 4323 - protein, 411 aa, unidentified
MIALTYQYKLRPNKQQEAEINQILDVCRSVYNYALRERKDWLSSKKSPINSCSIISEYIIPADTPYPSYNNQAKSLTIAKKTNPKLKSVSAKSRHENAQVLQQTLKTLDKAFSEMKSLGKGFPRFKKKLRSFVFPAMLKNCLGSTKVKLPQLGWIKIRQSRPYPEGMTAKQARIVKKASGYYLMITFTSSESVPDNPVGKVSLGLDAGIESFVATSTGQLIKSPKFLLSKLRELKLLQRRLKKKTIRSNNWFKFQNKIAKLHEKIANTRRDWHFKLAHKLCNLADNIFVENINFNSWSRGIVRKQSLDSGIGQFINEILPFVCWKRGKYYAKVDKNHTSQECPRCGHRQKKKLSQRSHNCNSCGYQINRDIAAAKVIRNRGLIAVGHTVNQNACGDGLAGVQLSLFDLLPS

SEQ ID NO: 4324 - protein, 244 aa, unidentified
MAQHAGYSRWCYNWGLSLWNAAYKDGFKPNARKLRDVFTNHTKPLYPWMKNLSSKVYQYAFINLSEAFKRFFKGLGKYPRFKKKGRSDSFTIDNCGKPIELNGWNHKLPFIGMVKTYEPIEATTQKITISRQASDWYLSCSYEFTPTATSKTTEVVGVDLGIKTLATLSTGEIFKSVKPYRQAQNRLAKLQRQLSRKVKHSNNWYKVVIKLAKQHRQVANIRKDALDKLTTYLAKVRLVPVRSL

SEQ ID NO: 4325 - protein, 262 aa, unidentified
MAQHAGYSRWCYNWGLSLWNAAYIDGYKPNSRKLREVFTNHTKPLYPWMKNLSSKVYQYAFINLGEAFKRFFQGLGKRPRFKKKGKSDSFTIDNCGKPIELNGWNHKLPFIGIVKTYEPIEATTKKITISRQAGDWYLSCSYEFTPTSTPKTTEVVGVDLGIKTLATLSTGEVFKSIKPYKKAQNRLAKLQRQLSKKVKHSRNWYKAVVKLAKQHRRVANIRKDALDKLTTYLAKNHGTVVIEDLNVSGMLANHKLAKSVSR

SEQ ID NO: 4326 - protein, 280 aa, unidentified
MYKSIKTKLKLNNKQKTFLAQHAGYSRWVYNWGLSLWNAAYKDGYKPNARKLREVFTNHTKPLYPWMKNLSSKVYQYAFRNLGEAFKRFFQGLGKRPRFKKKGRSDSFTIDNCGKPVELNGWSHKLPFIGWVKTYEPIEATTQKITISRQAGNWYLSLSYEFSATPTPKITDVVGVDLGVKTLATLSTGQAFPSIKPYRTAQDKLAKLQRELSRKVKHSNNWHNAVIKLARQHRRVANIRKDALHKLTTHLAKNHGHVVIEDLNVSGMMANHKLAKSVSR

SEQ ID NO: 4327 - protein, 390 aa, unidentified
MITFTYQYKLKPTWHQEAEINHILDVCKSVYNYALRERKDWLSSRKSSINSCSILTEYIIPADTSYPNYNYQAKNLTIAKKTNPRLKSVNAQVLQQTLKTLDRAFSEMKSLGKGFPRFKKKMRSFVFPAMLKNCLGNNRIKLPQLGWIKIKQSRPYPDGFQAKQARIVRKASGYYLMITFFSSESVPENPIGKRSLGIDAGIESFVATSTGKLIKSPKFLLSSLRELKLLQRRLKKKTRGSNNWLKLQNKIARLHEKIANTRRDWHFKLAHQLCDFTDNIFVEDINFKSCSRGIVRKQSNDSGIGQFINEILPYVCWKRGKYYAKVNKNYTSQECPLCGHIQKKKLSDRKHNCSNCGYQLNRDVAAAPTPSPPGREQEGWVRINSRGANG

SEQ ID NO: 4328 - protein, 333 aa, unidentified
MITLTYQYKLRPIKQQEAEINHILDVCKSVYNYALRERKDWLSSRKSPINSCSIISEYIIPADTPYPNYNIQAKTLTTAKKSNPRLKSVNAQVLQQTLKTLDRAFSEMKSLGKGFPRFKKRLRSFVFPAMLKNCLSDNRIKLPQLGWIKIRQSRQYPESMAAKQARVVKKASGYYLMVSFQSAELIPDNPVGKTSLGIDAGIESFIATSTGKLIKAPKFLLGKLRELKLLQRRLKHKTKGSNNWLKLQNKIGILHETIANTRRDWHFKLAHQLCNLADNIFVENINFVSWYRGIVRKQSLDSGIGQFINEILPYICWKRGKYYTKVDKDYTSQ

SEQ ID NO: 4329 - protein, 404 aa, unidentified
MIALTYQYKLRPNQQQEAEINQILDVCKSVYNYALRERKDWLSSRKSPINSCSIISEYIIPADTPYPSYNNQAKSLTIAKKTNPKLKSVNAQVLQQTLKNLDQAFSKMKSLGKGFPRFKKKLRSFVFPAMLKNCLGYTKVKLPQLGWIKIRKSRPYPEAMTAKQARIVKKASGYYLMITFTSSESVPDNPVGKVSLGVDAGIENFVATSTGQLIKSPKFLLSQLRELKLLQRRLKKKTIRSNNWFKYQNRIAKLHEKIANTRRDWHFKLAHQLCNLADNIFVEDINFNSWSRGIIRKQSLDSGIGQFINEILPFVCWKRGKYYAKVDKNHTSQECPRCGHRQKKKLSDRKHNCSNCGYQINRDVAAAKVIRNRGLIAVGHTVNQNACRDGLAGVQLSLFDLLPS

SEQ ID NO: 4330 - protein, 400 aa, unidentified
MTTPKAAGAAGLARYTYRLRVSSTARSALRAEWDRCRWLWNECVARSKKAYTEGETCGPARLDRMLTEARSNTPWLAEGSSVPQQQLIRDFGKSRAKAQKDMKERLPMHRRAGMPQRKKKREALPTLNYTRRGFRLKNGRLHLAGGIVLTVVWSRDLPTEPSSVRVYEDNVGNWYCSFVILTEVQPLPETGAVLGVDWGVKETATTTSDAHDLPHPQHGKRAQAKLTRYDRMAARRRPKKGQAASKGYREAKKWRAKTYQKIARQRHDTARKWAKQVVRDHDAIAVEDFRPKFLAKSSMARKAADAAIGATKKALLEMGRKHGRDIRLVHPAHTTMQCASCGARTKHALPLSERNYTCSACGAVSPRDKNSARVMLVRAGLNPAGAEGARPSGAPLQKAA

SEQ ID NO: 4331 - protein, 407 aa, unidentified
MATPVLGDGVGHARYTYRLRVSSTARTALEAEWGRCRWVWNECVAKSRQTHSHNKTRPGDKRTCGPAQLDKMLTEARAAMAWLREGASVPQQQTIRDFAKSRAKALKDIAKRLPMPRRAGMPRPKKKCEALPTLNYTKRGFRVKDGRLHLAGGIVLTVVWSRELPSDPSSVRVYRDSLGHWHASFVVAAQTQPLPATGTVIGIDWGVKETATTTSNAHDLPHAEHGKNAAQRLARYQRMMARRKPKRGQPASKGYRKAQKQTAKLHKKVARQRQDTARKWAKRVVRDHDAIAVEDFRPKFLAKTTMARKAADAAIGANKAALIDQARKHGRAVHLVDPAHTTMDCAHCGVRAKHRLPLSERTYTCTACGAVSPRDKNSARVMLVRAGLNPASAEGVRPPGALLPEAA

SEQ ID NO: 4332 - protein, 407 aa, unidentified
MATPVLADGVGHARYTYRLRVSSTARTALEAEWGRCRWVWNECVAKSRQTHAHNKTRPGDKRTCGPAQLDKMLTEARAAMAWLREGASVPQQQTIRDFAKSRAKALKDTAKRLPMPRRAGMPRPKKKCEALPTLNYTKRGFRVKDGRLHLAGGIVLTVVWSRELPSDPSSVRVYRDSLGHWHASFVVAAQTQPLPATGTVIGIDWGVKETATTTSNAHDLPHAEHGKNAAQRLARYQRMMARRKPKRGQPASKGYRKAQKQTAKLHKKVARQRQDTARKWAKRVVRDHDAIAVEDFRPKFLAKTTMARKAADAAIGANKAALIEQARKHGRAVHLVDPAHTTMDCAHCGVRAKHRLPLSERTYTCTACGAVSPRDKNSARVMLVRAGLNPASAEGIRPAGALLPEAA

SEQ ID NO: 4333 - protein, 399 aa, unidentified
MAVREAEGAGRVRYTYRLRVSSGARADLEAEWARCRWVWNESVARSKKAHADGEACGPARLDKMLTQARAVTPWLAAGSSVPQQQTVRDFAAARAKALKDIKDRLPARRRAGMPRHRKKHRARPTLNYTRRGFRLKDGRLHLAGGIVLTVVWSRPLPAEPSSVRVYRDRLGAWYASFVVPAQLQPLPATGRVLGVDWGVKETATTTSDAHDLPHPEYGRKAKERLCRYDRMMARRKPKKGQPASKGYREAKKWRAKTYQKIARQRQDTARKWAKKVVRDHDVIAVEDFRPRFLARTSMARKAADAAIGATKQALIEMGRKHARDVRLVHPAHTTMDCARCGARTKHVLPLSERTYTCTACGAVSPRDKNSARVMLLRAGLDPAGVEGARPPGALLQEAA

SEQ ID NO: 4334 - protein, 353 aa, unidentified
MKTLKLRIKDKHCKVLDQLASEVNFVWNYVNDLGFRHLKRKGEFLSAFDMAKYTKGTSKECNLHSQTIQAVTEELVTRRKQFKKAKLKWRVSNKKSARRSLGWVPFKKVAIKYANGYVQYGKHQFKLWDSYGLSKYTLKTGSFVEDSRGRWYVCLVVESPKQDESTATKAIGIDLGLKDIATCSDGTVISNPKFYRKYEQKLGIAQRARNKKRVRALHAKIANSRKDHLHKASTKLVNENALIIAGDLSAKKLVKTKMAKSVLDTGFSALKTMLKYKCENAGVLFEEVQEAYTTQICSCCGEITSSSPKGKTDLGIREWECMSCGTAHDRDINSALNILALGHKRLAVGITLV

SEQ ID NO: 4335 - protein, 353 aa, unidentified
MKTLKLRIKDKHCKVLDQLASEVNFVWNYVNDLGFRHLKRKGEFLSAFDIAKYMKGTSKECNLHSQTIQAVTEELVTRRKQFKKAKLKWRVSNKKSARRSLGWVPFKKVAIKYANGYVQYGKHQFKLWDSYGLSKYTLKTGSFVEDSRGRWYVCLVVESPKQDKSTATKAIGIDLGLKDIATCSDGTVISNPKFYRKYEQKLGIAQRARNKKRVRALHAKIANSRKDHLHKASTKLVNENALIIVGDLSAKKLVKTKMAKSVLDTGFSALKTMLKYKCENAGVLFEEVQEAYTTQICSCCGEITSSSPKGKTDLGIREWECMSCGTAHDRDINSALNILALGHKRLAVGITLF

SEQ ID NO: 4336 - protein, 432 aa, unidentified
MAEQVKEAPAELIQTRVYELRPNKTMRKVLDEACDYRRYCWNQGLALWNEMYKARQTLKSSLSTDFKKLTEEQKVLLKDKPSPSERRVRNMLVADKKDWQYTQSARILQLAISDLGKAWNNFFDKAQPGWGKPKFRSKREARQGFKSDRSKIKDGILYLEQARGSSVPKDQWHGFKLSEKPLSDEFGVVSYFKEKGRYYVAIPYKIKAEDIKLPDKTGKATAVDVNVGHFDYTGGRMNVLPKKLDKIYGKIKHYQRQLAKKQVKNGEAACESENYLKTKAKLQACYRKASNIQNDLMQKFTTELVNNYDKIVIENLSVKGMLMSHVASKGVHRSMFGKFKQFLTYKCDWYGKELILANKLYPSTQRCAACGNVKKGDDKITLYGNKKHGTKHNEYVCYNQKCPNYNKVVDRDKNAMLSLLALTEHPELNHAL

SEQ ID NO: 4337 - protein, 395 aa, unidentified
MQMVYKFRLYPTSEQEQFLLFVMEVCRWVYNHFLSIWNSVAKIPGRYDLQATLPQLKDDNPNLKKVNSKTLQMVLFMLYNNLKVLRELKKKGRKVGRLRYRKYGRFKSFILNQSGFKLKITDNRLDKLYVSKVGDIPIRLHQKIDGVIKQVIIKKYQSGKWYALICTEKDAQPKNQMPRSFIGLDMGLLHFLTDTAGRQIENPKFYKQTLKLIKIGQRKLSRKKKGSKNRLKQKLRLNRLYDKLTHQRDDFLHKLSRYYVDTYDLISVEDLNVTNMVKNHKLSQSILDSSWSKFFYMLSYKAESAGKILIKVNPKNTSKECSICGSMQDMPLSERIYNCSECGIVIDRDVNAAINILRRGIIRQGLPFTLPETAPLQSLLQVSASSVVEGRSHLR

SEQ ID NO: 4338 - protein, 407 aa, unidentified
MATLRKGSGDAGHVRYTYRLRMSSTARTALRAEWDRCRWVWNECVAKSRQVHVHNRQHPEKQTCGPAQLDKMLTEARAKTPWLCEGASVPQQQTIRDFAKARSKALKDIEKRLPVWQRAGMPRPKKKREALPTLNYTTRGFRLKDGRLHLAGGIVVTVVWSRELPSAPSSVRVYRDSLGHWYASFVVAAETRPLPATGRVIGVDWGVKETATTTSDDHDLPHVQHGKTAAQRLARYQRMMGRRKPARGQAASRGYREARRQAAKMNKKVARRRQDTARKWAKKVVRDHDAIAVEDFRPKFLARTTMARKAADAAISTTKTTLIEMGRKHGRDVRLVYPAHTTMDCASCGARTKHALPLSERTYTCTACGVMSPRDKNSARVMLVRAGLIPAGVEGVRPPGALLPEGA

SEQ ID NO: 4339 - protein, 422 aa, unidentified
MNYNYRYRLEPTERQRETLDYHRDTCRQLYNHALYRFTQIPEDESTVKQRVRKIRDELPDLKEWWDALTDVYSKVLQPTVMRVAKNIKALGKLKEHGYNVGELRWKSPREFRSFTYNQSGFELDKKSGQTVLSLSKLADIPIELHRPLPDDATVKEVTLKKEKTGEWFAIFGIEMDTEPPVKQSLEEIDAEEVVGIDVGILKYAHDTDGTAVESLDLSEERDRLEREQRKLSRKEHESNNWETQRQRVAACHLRIKRKRRDFLHKLSNYYAREYELVAVEDLDVKAMLGSPRNGRNTASVAWNTFTDMLEWKCKREGTYFMEVQPEGTTKECAQCGVETDKPLWIRDHSCPACGFEADRDANAAWNILFRGLTELGVGHSELTPVETALPADTAVVSAKRVVETGSPCLEERPATPRVSRQG

SEQ ID NO: 4340 - protein, 375 aa, unidentified
MADSVSVTRYSYRLRLSSSAGRALLVEWDRCRWVWNQCVAQSRETHRHNRENPEDPRTCGPAQLDKLLTGWRAEHVWLRAGSSVAQQQVVRDFGKSRAKALKDVRERVPQWRRAGMPRVKKRSLAEPTLNYTQRGFRLRDGVLQLAGGIVVRPVWSRELPAAPSSVRVYRDSLGHWYCSFVVRTRVQTLPVTGRVIGVDWGVRELATTTSDAYDLPHPEHGKKAAKGLARYQRMMARRRPAKGRPGSKGYQHAKRQAAKIQQKIARRRQDTGRKWAKRVVRDHDVLAVEDFRPKFLAKSTMARKAADAAIGATKRELITMARKHGRELRLVDPKHTTMDCAACGGEPSTHCRCPNAPTPARRAEPCPPGTRTPRR

SEQ ID NO: 4341 - protein, 406 aa, unidentified
MVRREGSENIGHARYTYRLRVSSTAHIGLMAEWARCRWIWNECVAMSRKVHHLNRDAAEKATCGPAQLDKMLTEARSAMIWLREGSSVPQQQTVRDFAKSRTKAIKDIKARLPLRQRAGMPRIKRKRDALPTLNYTTRGFRLKDGRLHLAGGIALTVVWSRELPSAPSSVRVYRDSIGHWYASFVVATEIQPLPGTGAVLGVDWGVRETATTTSDAHDLPHAQHGKNAAQRLAHYQRMTARRRPACGQAATKGYRQARAQTAKLHKKVARQRQDTARKWAKRAVRDHDAIAVEDFRPKFLARTTMARKAADAAIGATRTALIEMGRKHRRDIRLVHPAHTTMDCASCGARTKHALPLSERTYACTACGAVSPRDKNSARVMLIRAGLNPAGAEGARPPGALLPGAA

SEQ ID NO: 4342 - protein, 406 aa, unidentified
MTTPQVGGGPGHARYTYRLRVSKTARTGLEAEWARCRWVWNECVAMSHKVHAANRDAAEKATCGPAQLDKMLTEARAATGWLREGSSVPQQQTIRDFGKSRAKALKDVKAKLPMRQRAGMPRIKRKRDALPTLNYTQRGFRLKDGRLHLAGGIVLTVVWSRELPAAPSSVRVYRDAVGHWYASFVVAAEAQPLPATGRVLGVDWGVKETATTTSDAHDLPHAQHGKTAAQKLAHYQRMMGRRKPARGQATSRGYRQARKQTAKLHKKVARQRQDTARKWAKKIVRDHDAIAVEDFRPKFLAKTTMARKAADAAIGATKRALIEMGRKHGRDIRLVHPAHTTMDCASCGARTKHALPLSERTYTCTACGFVAPRDKNSARVMLVRAGLTPAGAEGVRPPGAPLLEAA

SEQ ID NO: 4343 - protein, 402 aa, unidentified
MGVGEGSRVRYTYRLRVSSTARVALEAEWARCRWVWNECVAKSKQVQERGRRTGVKETCGPAGLDRMLTEARRVMPWLREGSSVPQQQMIRDFGKARAKALKDIADRLPVNCRAGMPKLKKKRDTSLSLNYTTRGFQLRDGRLHLAKGIALTVVWSRELPSRPSSVRVYRDSLGHWYASFVVATSAEVLPATGAVIGIDWGVAETATTTSDAHDLPHAEFGSRAAQRLARYQRQMARRKPKHGQPNSRGYKESQRQAAKAHKKVARQRQDTGRKWAKRVVTDHDVIAVEDFKPTFLTKTTMARKAADAAIGATKAALVAMARKHGRDLRLINPAHTTMDCAQCGTRAKHRLPLSERTYTCTACGASSPRDRNSARVMLVRAGLNPAGAEGVRPVGALLPQAA

SEQ ID NO: 4344 - protein, 413 aa, unidentified
MTTLWKVAEGAGHARYTYRLRVSSAARTGLEAEWARCRWVWNECVAMSRKVHHLNRDTAEKTTCGPAQLDRMLTEARSTMTWLREGASVPQQQTIRDFAKSRAKAMKDIKAKLPVRQRAGMPRIKRKRDALPTLNYTTRGFRLKDGRLHLAGGIALTVVWSRDLPSTPSSVRVYRDSLGHWYASFVVATDMQPLPATGAALGVDWGVKETATTTSDAHDLPHAQHGKNAAQRLARYQRMMARRRPARGQAASKGYRHAQAQTAKLHKKVARQRQDTARKWAKSVVRDHDAVAVEDFRPKFLAKTAMARKAADAAIGATRTALIEMGRKHGRDIRLVHPAHTTMDCASCGARTKHALPLSERYTCTACGAVSPRDKNSARVMLVRAGLNPAGADRVRADGPLVPSRREPGIPVL

SEQ ID NO: 4345 - protein, 255 aa, unidentified
MLTTNYTYRIYPDATGQTELLEWMETCRGVYNYALRELKDWIASRKCSVDRCSLEKEYIIPADEPFPSYHRQQNNLPKAKKQFPHLGKVHSQVLQTTIRRLHDTWEAFQKRGRRAQTIFAEDLNVTGLTRGMLGKDCVDAAFGQFLSLTEWVCWKRGVYFAKVNPNGTSQTCPSCLATVSKGLEVREHHCPECGYRTHRDRAAAEMVLHRGQENVVTQGLWGRETACQVGLSGVDDLDKWRGAGIPNREAGKPAL

SEQ ID NO: 4346 - protein, 414 aa, unidentified
MATREKVSGDAGHARYTYRLRVSSTARTGLMAEWARCRWVWNECVAMSREVHTANRDAAEKATCGPARLDKMLTEARTAMSWLREGASVPQQQTIRDFAKSRAKALKDIKAKLPVRQRAGMPRIKRKHDALPTLNYTQRGFRLKDGRLHVAGGIALTVVWSRALPAPPTSVRVYQDSLGHWYASFVVATEAQPLPATGRVLGVDWGVKETATTTSDAHDLPHAEHGKRAAQRLARHQRMMARRRPACGQAASKGYREAQRQTAKVHKKVARQRQDAARRWAKRVVTDHDAIAVEDFRPKFLAKTTMARKAADAAIGATKTALIEMGRKHGRDTRLVHPAHTTMDCASCGARTKHALPLSERTYTCTACGVVSPRDKNSARVMLVRAGLNPAGADRVRAGGPLVPSQREPGIPVL

SEQ ID NO: 4347 - protein, 368 aa, unidentified
MLKAYRTEIRPSDEQAVMIHKTIGTCRYVYNLYLQKNKEAYKADSSFLSGYDFSKWLNNEHARREEFAWIKEVPSKAVKQAIMNAETAYKKFFKKLASFPCFKRKSDYGSFYLIGTIHVKRHLIQLPKLGKVRLKEKGYIPSAGVRSATVSREGDRYFVSVLVEEQEACKKKSGPSEGIGIDMGIKMFLYTSDGEHVANVSRSNQLAKLTKSLKHQQRKLARRVKGSANFQKQKVIVQRLHRRIRNIKTDLKRKTVLKIVKKNPQFITIEHLHVKGMMKNRTLSNAFQQIGIGYFTDWLKVKCAECEIELRRVDRFYPSSQICSCCGERKKMLLHVRTYDCEHCGMSLDRDWNASINLKNAKDYTVLV

SEQ ID NO: 4348 - protein, 432 aa, unidentified
MAEQIEEVPAELIQTRVYELHPNKTMRRVLDEACDYRRYCWNQGLALWNEMYKARQTLKSSLSTDSKKLTEEQKVLLKDKPSPSERRVRNMLVADKKDWQYAQSARILQLAISDLGKAWNNFFDKAQPGWVKPKFRSKREARQGFKSDQSKIKDGILYLERAKESSVPKDQWRGFKLSEKPLSDEFGVVSYFKEKGRYYVAIPYKIKAKDIKLPDKTGKATAVDVNVGHFDYTGGRINVLPKKLDKIYGKIKHYQRQLAKKQVKNGEAACESENYLKTKAKLQACYRKASNIQNDLMQKFTTELVNNYDKIVIENLSVKGMLMSHVASKGVHRSMFGKFKQFLTYKCDWYGKELILANKQYPSTQRCAACGNVKKGDDKITLYGNKKHGTKHNEYVCYNQKCPNYNKVVDRDKNAMLSLLALTEHPELNHAL

SEQ ID NO: 4349 - protein, 352 aa, unidentified
MTAVTTPTQRNGEDSGRARYTCRLRVSSTARSGLEAEWSRCRWIWNECAARSKKAYADGEECGPAALDRMLTQARAHTPWLADGSSVPQQQIIRDFGKARAKALKDIRDRLPVRRRAGMPKPKKKREAPPTLNYTQRGFGLRDGRLHLAGGIVVTVVWSRSLPADPSSVRVYRDSLGHWYASFVVPAQTQPLPVTGRVLGVDWGVKETATTTSDDHDLPHAEHGRKAAQRLAHDTVAVEDFRPKFLAHSTMARKAADAGIAATKTALIEMGRKHGRDIRLVNPAHTTMDCASCGARTKHALPLSERTYTCTRCGAVFPRDKNSARVMLLRAGLNPAGVEGARPVGAPLPQAA

SEQ ID NO: 4350 - protein, 385 aa, unidentified
MIKTQVVKLKVNKTIQKHLDALCDYRRYCWNKGLETWQLMYEAHTLNKKDNPSPNERRVRDELVANKADWQYDLSARCLQLAIKDLANAWKNFFDKAQPDWGIPSFKSKKSPRQGFKTDRAKIVNGKLRLDRPRSISKDSWHDLSSYEVLKMSEVKVVSIFKEKGAYYAALTYEEEPISKTKTHQKTAVDVNVGHFNYTDGKINVLPAKLQKLYKRIKHYQRMLARKREVNGKLATKSNNYYAVRIKLQRDYRKVANIQNDLLQQFTTKLVDNYDQIVIEDLAVKQMMMTHVASKGMQRSLFSRFRQILTYKCNWYGKELILADKTYPSTQRCAACGYVKKGEEKITLQGNKKHGTKHNEYICYECGYKNDRDKNAVLNLLALAR

SEQ ID NO: 4351 - protein, 267 aa, unidentified
MIKTQVVKLKVNKTMQKHLDALCDYRRYCWNKGLETWQLMYEAHTLNKKDNPSPNERRVRDELVTNKADWQYDLSARCLQLAIKDLANAWKNFFDKAQPDWGIPSFKSKKSPRQGFKTDRAKIVNGKLRLDRPRSISKDSWHDLSSYEVLKMSEVKVVSIFKEKGAYYAALTYEEEPISKTKTHQKTAVDVNVGHFNYTDGKINVLPAKLQKLYKRIKHYQRMLARKREVNGKLATKSNNYYAVRIKLQRDYRKVANIQNDLLQQFT

SEQ ID NO: 4352 - protein, 267 aa, unidentified
MIKTQVVKLKVNKTIQKHLDALCDYRRYCWNKGLETWQLMYEAHTLNKKDNPSPNERRVRDELVTNKADWQYDLSARCLQLAIKDLANAWKNFFDKAQPDWGIPSFKSKKSPRQGFKTDRAKIVNGKLRLDRPRSISKADWFDLKSYEVLKMSEVKVVSIFKEKDSYYAALPYEEEISSKAKTHQKTAVDVNVGHFNYTDGKINVLPAKLQKLYKRIKHYQRMLARKREVNGKLATKSNNYYAVRIKLQRDYRKVANIQNDLLQQFT

SEQ ID NO: 4353 - protein, 420 aa, unidentified
MNYNYRYRLTPTKSQRETLDYHRDTCRQLYNHALYRFNQIPENEGTVKQRVRKIRDELPDLKDWWDALTDIYSKVLQPTVMRIAKNIKRLGKLKEKGYKVGELRWKSPREFRSFTYNQSGFELDNKSGQTVLSLSKLADIPIELHRPLPDDATVKEVTLKKEKTGEWFAIFGIEMDTEPPAKPPLGDIDTDEMVGIDVGILTYAHDTDGTAVESLDLSEERERLEREQRNLSRKEHGSNNWEEQRRRVAECHLQIKFKRRDFLHKLSNYYAREYEVVAVEDLNVKGMLESPRNSRNTASAAWSTFTDMLETKCEREGTHFVEVDPEGTTKECAQCGVETDKPLWVREHSCPACGFKADRDANAAWNVLSRGLTKLGVGHSESTPVETALPAGTAVVPAKRVVEAGSPCLKEPPTAASRQG

SEQ ID NO: 4354 - protein, 420 aa, unidentified
MNYNYRYRLKPTERQRETLDYHRDTCRQLYNHALYRFNQIPEDEGTVKQRVRKIRDELPDLKDWWDALTDIYSKVLQPTVMRIAKNIKRLGQLKEQGYKVGELRWKSPREFRSFTYNQSGFELDKKSGQTVLSLSKLADIPIELHRPLPDDATVKEVTLKKEKTGEWFAIFGIETDTEPPAKPSLEEIDTDEMVGIDVGILKYAHDTDGTAVESLDLSEERDRLEREHRNLSRKAYESNNWEKQRRRVAECYLDIKRKRRDFLHKLSAYYAREYELVAVEDLDVKEMLESPRNSRNTASAAWNTFTDMLEYKCEREGTHFVEVEPEGTTKECAQCGVETEKPLWVREHSCPACGFEADRDANAAWNILCRGLSELGVGHSEGTPVETALPVDTAVVSAKRVVETGSPCLKELPKAASRQG

SEQ ID NO: 4355 - protein, 390 aa, unidentified
MKKLKKAYKTEIKPTEEQITKIHRTIGVSRFIYNFYVSHNKEVYEREKKFVSGMDFSRWLNNEYIPSNIDKLWIKGVSSKATKQAIMNGEKAFKKFFNGKSGFPKFKKKKNQDVKAYFPKNNKTDWTIERHRIKIPTLGWVRLKEYGYIPANGRITSGTVSQKADRYYVSVLVDEDIQVNNKPHSEGIGIDLGLKDFAICSNGITKKNINKTKTVKKAEKKLKREQRKLSRKYESLKLRNKKEKGEAARQNIQKQIVKVQKLHQKLTNIRTDYINKTVSELIKQKPSFITIEDLNTKGMMKNRHLAKAVAQQKFYEFRIKLISKAKQNNIEIRVVDRFYPSSKTCSCCGNIKKDLKLSDRVYKCVNCNTSIDRDLNASINLANAKEYKIA

SEQ ID NO: 4356 - protein, 432 aa, unidentified
MAEQIEEVPAELIQTRVYELHPNKTMRRVLDEACDYRRYCWNQGLALWNEMYKARQALKSSLASDSKKLTEEQKVLLKDKPSPSERRVRNMLVADKKDWQYTQSARILQLAISDLGKSWNNFFDKAQPGWGKPKFRSKREARQGFKSDRSKIKDGILYLERARRSSVPKDQWCGFKLSEKPLSDEFGVVSYFKEKGRYYVAIPYKIKAEDVKLPDKTGKATAVDVNVGHFDYTGGRVNVLPKKLDRIYKKIKHYQRQLAKKRVKNGEAACESINYLKTKAKLQACYRKASNIQNDLMHKFTTELINDYDKIVIENLSVKGMLMSHVASKGVHRSMFGKFRQILTYKCDWYGKDLILANKLYPSTQRCAACGNVKKGDDKITLYGNKKHGTKHNEYVCYNEKCPNYNKVVDRDKNAMLSLLALTEHPELNHAL

SEQ ID NO: 4357 - protein, 432 aa, unidentified
MAEQVEEVPAELIQTRVYELHPNKTMRRVLDEACDYRRYCWNQGLALWNEMYKARQTLKSSLASDSKRLTEEQKVLLKEKPSPSERRVRNMLVADKKDWQYAQSARILQLAISDLGKAWNNFFDKAQPGWGKPKFRSKREARQGFKSDRSKIKEGILYLERARGSSVPKDQWRGFKLSEKPLSDEFGVVSYFKEKGRYYVAIPYKIKVEDVKQPDKIGKATAVDVNVGHFDYTGGRVNVLPKKLDRTYKKTKHYQRQLAKKRVQNGEAACESKNYLKTKAKLQACYRKASNIQNDLMHKFTTELVNDYDKIVIENLSVKGMLMSHVASKGVHRSMFGKFKQILTYKCDWYGKELILANKLYPSTQRCAACGNVKKGDDKITLYGNKKHGTKHNEYVCYNEKCPNYNKIVDRDKNAMLSLLALTEYPELNHAL

SEQ ID NO: 4358 - protein, 358 aa, unidentified
MRKAYKFRLYPTKEQQVQIQFTLERCRLLYNRLLEERRIAYETNKTTLNYYDQANTFNERKKHIPVLKQVHSQVLQDVAKRLDKAFQAFFRRVKSGETPGYPRFKSVGRYDSFTYPQGGYLLNGNKLKLSKIGEVKIKLHRQPQGEIKTCTIIVKNGKYYTCLSCETEPMPLQACDDAVGIDLGVKHLAITSDEDFYEHPKFFRESERKLKRKQRVVSRKKKGSNRRRKAIRELAKLHEHIANQRKDNAHKVSRKLVNQYGLIAFENLNVQGMVKNHHLAKSIADASWNQLVQYTTYKAEEAGRRVVLVDPKNTSQLCSNCGEVVPKKLSERIHRCEHCGYVQDRDINAAKNILKRAL

SEQ ID NO: 4359 - protein, 359 aa, unidentified
MRKTYKYRLFPTKAQREKIEFTLEHCRLLYNRLLDERRFAYKTDKTTLNYYDQANTLSTRKKYIPALKQVHSQVLQDVVKRLDKAFQAFFRRVKAGETPGYPRFKSAGRYDSFTYPQGGYAINGHTLTLSKIGEVKVKLHRQPQGKIKTCTVIVKNGKYYASLSCEVERNPLPESKQAVGIDLGVKHLAVTSDEDFYEHPKFLRESERKLRRKQRSVSRKKKGSARRRKAVKELAREHEHIANQRRNNAHKVSRELVNRYGFIAFEKLNVQGMVKNHHLAKSIVDASWNQLVQYTTYKAEEAGRRVVLVDPKNTSQLCSSCGEMVPKKLSERTHRCEHCGYVADRDVNAAKNILKRVIA

SEQ ID NO: 4360 - protein, 344 aa, unidentified
MRRAYKYRLFPTKAQREKIEFTLEHCRLLYNRLLDERRFAYKTDNTTLNYYDQANTLNARKKYIPALKQVYSQVLQDVAKRLDKAFRAFFRRVKAGETPGYPRFKSVGRYDSFTYPQSGYAINGRTLTLSKIGEVKVKLHRQPQGKIKTCTVIVKNGKYYASLSCEVERNPLPESKQAVGIDVGVKHLAVTSDEDFYEHPKFLRESERKLRRKQRSVSRKKKGSARRRKAVKELAREHEHIANQRRNNAHKVSRELVDSYGLIGFERLDVQGMLKNHHLAKGIVDASWNQLVQYTTYKAEEAGRRVVLVDPKNTSQLCSSCGEMVPKNLSERTHRCEHCGYVAD

SEQ ID NO: 4361 - protein, 356 aa, unidentified
MKHTKTLKVRIKDRHRPLLQQMAWSVNQVWNYVNELSQRSIRERGVFLSAYDIQPYTNGAGKDLGLHSHTVQEVGREYVTRRQQFKKTRLQWRKSGGVRRSLGWIPFKSGAVTWKQGQVYHNGHFFKVWDSYGLAQYRFRAGSFSEDARGRWYLNVVVEVEAEVPAGQDAIGIDLGFKDTATCSDGTTLEAARFYRDLEPALARAQRARKKARVKAIHAKIANRRKDALHKFSRQLVNRCGVIIIGDVKSRSFTRNRKSAKTVYDTGWAMLKQFLSYKSACAGIVFQAVNEAYTTQTCSCCGAISANSPKGRAGLGIREWTCECGATHDRDINAARNILALGHERLAGGITVSSGR

SEQ ID NO: 4362 - protein, 353 aa, unidentified
MKTLKLRIKDKHCKVLDQLASEVNFVWNYVNDLGFRHLKRKGEFLSAFDIAKYTKGTSKECNLHSQTIQAVTEELVTRRKQFKKAKLKWRVSNKKSARRSLGWVPFKKVAIKYATGYVQYGKHQFKLWDSYGLSKYTLKTGSFVEDSRGRWYVCLVVESPKQDKSTATKSIGIDLGLKDIATCSDGTVISNPKFYRKYEQKLCIAQRARNKKRVRALHAKIANSRKDHLHKASTKLVNENALIIVGDLSAKKLVKTKMAKSVLDTGFSALKTMLKYKCENAGVLFEEVQEAYTTQICSCCGEITSSSPKGSTDLGIREWECMSCGTAHDRDINSALNILALGHKRLAVGITLF

SEQ ID NO: 4363 - protein, 353 aa, unidentified
MKTLKLRIKDKHCKVLDQLASEVNFVWNYVNDLGFRHLKRKGEFLSAFDIAKYTKGTSKECNLHSQTIQAVTEELVTRRKQFKKAKLKWRISNKKSARRSLGWVPFKKVAIKYATGYVQYGKHQFKLWDSYGLSKYTLKTGSFVEDSRGRWYVCLVVESPKQDKSTATKSIGIDLGLKDIATCSDGTVISNPKFYRKYEQKLCIAQRARNKKRVRALHAKIANSRKDHLHKASTKLVNENALIIVGDLSAKKLVKTKMAKSVLDTGFSALKTMLKYKCENAGVLFEEVQEAYTTQICSCCGEITSSSPKGSTDLGIREWECMSCGTAHDRDINSALNILALGHKRLAVGITLF

SEQ ID NO: 4364 - protein, 423 aa, unidentified
MNKNDAIKASMKATKAKRKTQMCRVYETKIDLSHLNHATQEHLNRLFLEGKWLRNYVLSQKKIFGIDDKIHEVPVKVKDVFEIRELKCLSSQMRQSIIGRIQDDIRGLAEKKKKGYKVGKLKYKSEMQSIPLKQFGNTFKILDKKYIHIQNIDQKLKVIGLKQIPEGVDIANGTLIHRNGNYYLSITTYQEKVKQVPANKSVGIDFGISNQLMLSRTAIAIQYSIPVSPKLRRIARTLSKQELHSKNWNKTRIKLNKEYEKATNIKQDIKNKVVSFLKNNYEIICVQDESLKAWQQIWGRKMLSTSIGGIISALTKKAHTLIEVPKNFPSTKTCSKCGNIQDMPLDKRIYVCENKKCGNIMDRDYNSSIDMEIEGLKQVGTERIELTPAEIESSTLIALRYFNSIPRIKASSVYETGSLTALA

SEQ ID NO: 4365 - protein, 413 aa, unidentified
MYYAYKYRLKPSDAHREELDRHRDICRQLYNHTLYRLNEYQDDHGELPSMTTLRSELPDLKTWWDGLSDVYSKVLQTVVERLFDNLKGLSALKENGYGVGQLKWKPPREFRSFTYSQSGFKLDKKGGQTVLSLSKLADIPIRLHRAIPDDAKLKQVTVKKEPTGEWFATFGVQMDREPPEPPENPEKCVGIDVGILKYAHDTDGTAVESLDLSDERDRLEREQRKLSRKQHGSNNYEKQRRRVAECHADLRRKRRDFLHKLSAYYAREYDLVAVEDLNVKGMMESPSNSRNTASAAWRTFLSLLEYKCEREGTHFVAVNPRGTTKECASCGVSTDKPLWVREHSCPACGFEADRDANAAWNILSRGLEDVGVGYSESTPVETALPVDTPVSAKRVVEAGSPTLKERTASAVSE

SEQ ID NO: 4366 - protein, 353 aa, unidentified
MKTLKLRIKDKHCKVLDQLASEVNFVWNYVNDLGFRHLKRKGEFLSAFDIAKYTKGTSKECNLHSQTIQAVTEELVTRRKQFKKAKLKWRVSNKKSARRSLGWVPFKKVAIKYATGYVQYGKHQFKLWDSYGLSKYTLKTGSFVEDSRGRWYVCLVVESPKQDKSTATKSIGIDLGLKDIATCSDGTVISNPKFYRKYEQTLGIAQRARNKKRVRALHAKIANSRKDHLHKASTKLVNENALIIVGDLSAKKLVKTKMAKSVLDAGFSALKTMLKYKCENAGVLFEEVQEAYTTQICSCCGEITSSSPKGRTDLGIREWECMSCGTAHDRDINSALNILALGHKRLAVGITLF

SEQ ID NO: 4367 - protein, 374 aa, unidentified
MSVGKTALRAYKTEIDPNPEQIVLIHKTIGTCRYVYNLFIQKNKERYEESEKFLSGYDFSKWLNNVHSKQEEFKWIKDVSSKAVKQSIMNADGAYKKFFKKLTAFPKFKKRSDYGNFYLIGSIRVKRHLIQLPTLGKVKLKEKGYIPFENVKSCTVSREGDRYFVSVLVEEDKLPKTETKKTEGVGIDMGIKEFLYTSNGESVANFSKSEQLIKLTKSLKRQQRKLSRREKGSANFRKQKVIIQRLHRKIRNIKMDLKRKLILKIVQRNPQFVTIEHLNIKGMQRNRRLSNSLQQIGIGYFIEWLRMKCLEREIELRRADRFYPSSQICSGCGERKKMPLHVRLYDCDHCGMKKDRDLNASINLKKAKEYTVLT

SEQ ID NO: 4368 - protein, 384 aa, unidentified
MKLQNLSQHKEGLLSRAFAEAKWLYNWLVSDTERLSLAVNKIDAVDVKVSKTFKERVLTVLGSQVKQEIADRLRDNLRALGKLKKNGHKVGALKPKKFINSIPLKQYGVTYKLDFARNRVRIQNLGTFRVLGLQQIPEKAEIANGVLVRKPSGYYLHVTCYIPREDSVRKHIGEAVGIDFGVNKKLTLSNGLQIRFELHETKRLKRLQRDISRCKNGSSNREKLRAKLRKEYEKINNRRKDVQNKVLAYLKQYKVVVYQDDFIKGWEALFGRQIHASGIGGLKSRLRNSLETPIEVARYERTTQECFQCGKVHRLSLSERMMECECGWESDRDVNAALVILRKGLGLEPKQAVGLDRPELKPLERETAARILGSNPYICVSFTQ

SEQ ID NO: 4369 - protein, 407 aa, unidentified
MTTDAKASGEAGHARYTYRLRVSAGASGLLEAEWARCRWVWNECVAKSKAVYLHNKVTGERLTCGPAQLDKMLTEARQMTPWLAEGSSVPQQQVIRDFAKSRAKALKDIKDRLPIHRRTGMPRWKKKRDARPSLNYTRRGFRLKDGRLHLAGGISLTVVWSRDLPADPSSVRVYKDTLGHWHASFVTLALIEPLPATGRVLGVDWGVKDTATTTSDAHDLPHAEHGRKAAQRLASYQRRMARRRPAKGQAASRGYQEAKRQTAKLHAKTARQRRDTARKWAKTVVRDHDAIAVEDFRPKFLAKTSMARKSADAAIGVTKAVLIEMGRKHGRDVRLVHPAHTTMDCASCGARTKHALPLSERTYACTACGAVSPRDKNSARVMLVRAGLSPAGVEGVRPARPLDAQAA

SEQ ID NO: 4370 - protein, 353 aa, unidentified
MKTLKLRIKDKHCKVLDQLASEVNFVWNYVNDLGFRHLKRKGEFLSAFDIAKYTKGATKECNLHSQTIQAVTEELVTRRKQFKKAKLKWRVSNKKSARRSLGWVPFKKVAIKYANGYVQYGKHQFKLWDSYGLSKYTVKTGSFVEDSRGRWYVCLVVESPKQDKSTATKAIGIDLGLKDIATCSDGTVISNPKFYRKYEQKLGIAQRARNKKRVRALHAKIANSRKDHLHKASTKLVNENALIIVGDLSAKKLVKTKMAKSVLDTGFSALKTMLKYKCENAGILFEEVQEAYTTQICSCCGEITSSSPKGRTDLGIREWECMSCGTAHDRDINSALNILALGHKRLAVGITLF

SEQ ID NO: 4371 - protein, 432 aa, unidentified
MAEQVKEAPAELIQTRVYELRPNKTMRKVLDEACDYRRYCWNQGLDLWNEMYKARQTLKSSLSTDSKKLTEEQKVLLKDKPSPSERRVRNMLVADKKDWQYTQSARILQLAISDLGKAWNNFFDKTQPGWGKPKFRSKREARQGFKSDQSKIKDGILYLERAKESSVPKDQWRGFKLSEKPLSDEFGVVSYFKEKGRYYVAIPYKIKAEDIKLPDKTGKATAVDVNVGHFDYTGGRMNVLPKKLDKIYGKIKHYQRQLAKKQVKNGEAACESENYLKTKAKLQACYRKASNIQNDLMQKFTTELVNNYDKIVIENLSVKGMLMSHVASKGVHRSMFGKFKQFLTYKCDWYGKELILANKLYPSTQRCAACGNVKKGDDKITLYGNKKHGTKHNEYVCYNQKCPNYNKVVDRDKNAMLSLLALTEHPELNHAL

SEQ ID NO: 4372 - protein, 384 aa, unidentified
MLKSFKTEINPTKKQIIKINKTIGACRYVYNFYIAYNKELYENNKEFMSGKSFSVWLNNEYIPNNPDKKWIKEVSSKSVKKSIENGNTAFLNFFKHKSNFPKFKKKNNSNIKMYFVKDNKTDCLCERHRIKVPTLGWVRLKEKGYIPISKDGFIVRSRTISYKAGRYYISVLIDMPEQNTQINNNPGIGIDLGLKEFVICSDNSIFQNINKTNNIRKVEKKLRREQRKLSRKIILIEKGEPAQNNFVKQKLKVQKLYQRLTNIRIDYLNKTINSIVKTKPSFIVIEDLNISDMMKNKHLSKAVAQQKFFEFKTKLISKCKEYNIELRIVDRFYPSSKLCHNCGHIKKDLKLSDRIYICSECGYTEDRDINASLNLRDAKTYTII

SEQ ID NO: 4373 - protein, 392 aa, unidentified
MRDLLKSFKTEINPTPEQITKINKTIGTCRYLYNFYLSYNLKRYEQGEKFMSGKSFSVWLNNEYLPTHPEYSWIKEVSSKAAKHAVECGCTAFTRFFKHQSGFPKFKKKDISDVKMYFVKNNPKDCYCERHRINIPTIGWVRLKEKGYLPTTKDGWRIRSGAVSKKAGRYYVSVLVDVPYSQVKSKEDQTEGIGIDLGLKEFAVLSNGKIYKNINKTSRIKKLEKQLRRAQRCLSRKYENLKKMKKGESAQRANIQKQKLRVQKLHQRINQIRTDYINKTIAEMVKTKPSHITIEDLNVKGMMKNRHLSKAVASEKFYEFREKLMMKCHEEGIELRVVSRWYPSSRKCHSCGCIKKDLKLSDRIYRCSCGYVEDRDRNAALNLKDAETYEIA

SEQ ID NO: 4374 - protein, 414 aa, unidentified
MVLRGFRYKLAPTADQETLFRQFAGVCRLVYNLALEQRHDWWRQFERTTKSKLNYVAQARELTKLRAEFDWIAAVSQTCQQQALRDLDKAFANFFAGRACYPTPRRKGVNDAFRFQGREVEVRKLNGKWSAVRLPKIGWVKFRDSRPLRGTVKNVTIAMDALGWHVSFACEIDHVAPINICPAVGIDRGVANTLTLSTGEHLSVPASLEAIERRCRSAQHVVGRRKKGSKRRLTAIRRAFRLSAKRARIRRDWQHKTALDMSRRFGTVVLEDLRIKNMTASARGTMEEPGRMVRQKAGLNRSILNQGWFGFETILAYKLEERGGYLLKVDPAYTSQTCSECGAVDSRSRESQAAFVCRHCGFRAHADHNAAINILRRNSASMRMEEGHWLSDEVRTGRGLAPPENPPASAGGRC

SEQ ID NO: 4375 - protein, 365 aa, unidentified
MRAYKTEIKPNKAQIELINQTIGVTRYVYNLFITKNQNRYKRNLSFMSGYDFSKWVNNRHSKEKQWIKNVPSKAVKQTIMNAEDSYRKFFKGHSSYPKHKKKSLNGAFYLIGTIKVERHRIFLPKLKWIQLKEFGYIPKSNIKSATISRKGSHYFVSVLVDEPFTVNVRNQKSEPIGLDLGLKETVYSSNGEKLMSLYRNKQLIKLNKSLKRQQRKLSRKQKGSNNRYKQLLKINRLYQRISNIKTDMKRKLISTIIKANPRYITIENLNIKGMMKNRRLSNALQQTGLGYVVEWLKHKSKQHDIELRQVDRFYPSSQLCSCCKHRQKMPLNKRTFYCENCGNEIDRDWNASLNLVKAEDYVVLT

SEQ ID NO: 4376 - protein, 368 aa, unidentified
MKSYKTEVKPNKQQIIEINKTINACRSVYNKFIEVNKFRYDNGLKFLNHRKFSVWYNNDFIPNNKDKKWTKEVNTKATKQAMANAEDAYKRFFNNISGFPKFKKTQSNGSYYLIGTIHVERHRIRLPNLKWVKLKEKGYIPENNIKSATIIKENDRYYVSVLVDEEPKTILKKPHTEGIGIDLGLKDTLFTPSGVKITDLRKNKKLVKLHKSLKRQQRKLSRKQKKSNNWSKQLLKVQRLYRKISNIKKDIKQKKILEIVQENPQSITIENLNIKGMMKNKRLSNSFQQIGLGYIIEWLKWKCYQYDIELRQVDRFYPSSQICNQCGNRQKMPLNKRIYKCDNCGMIEDRDINASINLKQAKEYTILL

SEQ ID NO: 4377 - protein, 428 aa, unidentified
MKQQRGHKAKLYLTPSQTLTADDQGHAARTMWNCLHSWWTMLPKGKRNLADADQAIRQGRKDLDFLSDLPAQAAQQVLKTYFRAWQNCWEGRAEAPNFKARFRSRMAIDIPQGRDLQIVRVNRRWGRMWAPKIGFVRFRWTKDLPVGKRADKNNNVTGARLVKEADGWYVVFRVQTEVPEPAEHAGPTVGIDRGIAKPLALSDGTFREHGPWLAKGETERLRRLEKSKEAKRQARKKGPRKKGERDGKPSKRLARTYGQIAQLRAKAKRRAADWQHKVTTEITETFSRIGVEDLAITNMVKSAKGTVEAPGKNIRQKAGLNRSIAGEAWGRTVTLLEYKAAARGGQVVKVPAPNTSRRCSACGFITPGSRETQSRFVCKNPDCGFECNADTNAGRNIDHAAGSAVSGRGDLGATRSAKRQPPTQPHAA

SEQ ID NO: 4378 - protein, 432 aa, unidentified
MAEQVKEAPAELIQTRVYELRPNKTMRKVLDEACGHRRYCWNQGPALWNEMYKARQTLKSSLSTDSKKLTEEQKVLLKDKPSPSERRVRNMLVADKKDWQYAQSARILQLAISDLGKAWNNFFDKAQPGWGKPKFRSKREARQGFKSDQSKIKDGILYLERAKESSVPKDLWRGFKLSEKPLSDEFGVVSYFKEKGRYYVAIPYKIKAEDIKLPDKTGKATAVDVNVGHFDYTGGRMNVLPKKLDKIYGKIKHYQRQLAKKQVKNGEAACESENYLKTKAKLQACYRKASNIQNDLMQKFTTELVNNYDKIVIENLSVKGMLMSHVASKGVHRSMFGKFKQILTYKCDWYGKELILANKLYPSTQRCAACGNVKKGDDKITLYGNKKHGTKHNEYVCYNEKCPNYNKVVDRDKNAMLSLLALTEHPELNHAL

SEQ ID NO: 4379 - protein, 419 aa, unidentified
MHYAYRFRLKPTAEQRETLDYHRDTCRQLYNHALREFTKIPDSAGTLNQRVRQVRNQLTDLKDWWEELNDLYSTVAQAAVMRIEDSIKALSELKEKGYNVGSLNWKAPKEFRSFTYVQSGFEFDKKNGQTVLSLSKLADIPIECHRQIPEDETVKEVTLKKEPTGEWYASFAVDDKDEPAKPSLEDVDADEMVGIDVGILKYAHDTDGTAVGSLDLADERDRLEREQRKLSHKEHGANNWENQRQAVAECHLDIKRKRRDFLHKLSNYYAREYDLVAVEDLDVKGMLESPRNSRNTASAAWSTFTDLLEYKCEREGTHFVEIDPDGTTKECAQCGVKTAKPLWVREHSCPACGFEVDRDANAAWNVLSRGLSKLGVGHSEGTPVETALPTGTAVVPAKRVVEAGSPCLKEPPTAASRQG

SEQ ID NO: 4380 - protein, 418 aa, unidentified
MHYAYRFQLKPTDQQREVLDYHRDTCRQLYNHALREFDKIPESAGTLNQRVRQVRDQLPALKDWWDELNDLYATVAQAAVMRIEDSIKALSELKKKGYSVGSLNWKLPREFRSFTYVQSGFEFDKKNGQTVLSLSKLADIPIECHRDIPDDETIKEVTLKKEPTGEWYASLAVDDKEKPEKPSLDEINTDDMVGIDVGILKYAHDTDGVAVGSLDLSDERDRLEREQRSLSRKEHRSNNWEKQRQIVAECHQQIKRKRRDFLHKLSAYYAREYDLVAVEDLNVKGMLESPRNSRNTASAAWNTFTELLEYKCEREGTHFVAVDPRGTTKECAECGVETDKPLWIREHSCPSCGFEADRDLNAALNVLFRGLSELGMGHSKSTPVETALPAGTAVVPAKRVVETGSPTLKKRPASAVSE

SEQ ID NO: 4381 - protein, 418 aa, unidentified
MHYAYRFQLKPTDQQREVLDYHRDTCRQLYNHALREFDKIPESAGTLNQRVRQVRDQLPALKDWWDKLNDLYATVAQAAVMRIEDSIKALSELKKKGYSVGSLNWKLPREFRSFTYVQSGFEFDKKNGQTVLSLSKLADIPIECHRDIPDDETIKEVTLKKEPTGEWYASLAVDDKEKPEKPSLDEINTDDMVGIDVGILKYAHDTDGVAVGSLDLSDERDRLEREQRSLSRKEHRSNNWEKQRQTVAECHQQIKRKRRDFLHKLSAYYAREYDLVAVEDLNVKGMLESPRNSRNTASAAWNTFTELLEYKCEREGTHFVAVDPRGTTKECAECGVETDKPLWIREHSCPSCGFEADRDLNAALNVLFRGLSELGMGHSESTPVEPALPAGTAVVPAKRVVETGSPTLKKRPASAVSE

SEQ ID NO: 4382 - protein, 403 aa, unidentified
MILRGFRYKLVPAPEQEALFRQFAGVCRLVYNLALEQRQVWGRSHRIGYIQQAVDLTRLRAEYDWIAAVSQTCQQQALRDLDKAFANFFKGVARYPTSRCKGVNDSFRFQGREVNVKRLNGKWSAVRLPKIGWVKFRDTRPMRGTLKNVTVSVDALGWHISFAREIEHDAAANTRPSVGIDRGVVNTLALSTGEQMSMPRSLEAIEQRKRRVQKVVARRKRGSKRWAKALRRVARLSARISRIRKDWHHKTSLDIACRFGTVVLEDLKINNMTASGRGTMAEPGRNVRQKAGLNRSILNQGWFGFETILAYKLAERGGTLEKVDPAYTSQQCSQCDCIDKRSRESQARFVCIDCGYVEHADTNAALNILRRNTAFMRVEESFGFPMKRELPIGNPRPSGWGRC

SEQ ID NO: 4383 - protein, 415 aa, unidentified
MYYAYKYRLEPSDVHREELDRHRDICRQLYNHALYRFDQIPESAGTLTQRVRSIRDEIPSLKDWWDGLTDVYSTVLQTAVMRIEQNIKSLGKLKQNGYGVGMLKWKSPREFRSFTYSQSGFKLDKKGGRTVLCLSKLADIPIRLHREIPDDAALKQVTLKKEPTGKWFATFGVELDHEPPTRPENPDRCVGIDVGILTYAHDTDGHAIESVDLSDERERLEREQRKLSRKEHGSNSYRTQQKVVAERHADLKRKRREFLHKLSDYYAREYDLVAVEDLDTKGLMELPSNSRNRAGAAWGTFLRLLEYKCEREGTHFVAVDPAGTTKACAACGIETSKPLWVREHSCPSCGFTADRDANAALNIRSRGLDHVGVDHSESTPVETALPVDIVVSAKGVLEAGSPALKEAASRLSRAG

SEQ ID NO: 4384 - protein, 353 aa, unidentified
MKTLKLRIKDKHCKVLDQLASEVNFVWNYVNDLGFRHLKRKGEFLSAFDIAKYTKGTSKECNLHSQTIQAVTEELVTRRKQFKKAKLKWRVSNKKSARRSLGWVPFKKVAIKYATGYVQYGKHQFKLWDSYGLSKYTLKTGSFVEDSRGRWYVCLVVESPKQDKSTATKSIGIDLGLKDIATCSDGTVISNPKFYRKYEQKLCIAQRARNKKRVRALHAKIANSRKDHLHKASTKLVNENALIIVGDLSAKKLVKTKMAKSVLDTGFSALKTMLKYKCENAGVLFEEVQEAYTTQICSCCGEITSSSPKGRTDLGIREWECMSCGTAHDRDINSALNILALGHKRLAVGITLF

SEQ ID NO: 4385 - protein, 353 aa, unidentified
MKTLKLRIKNKHCKVLDQLASEVNFVWNYVNDLGFRHLKRKGEFLSAFDIAKYTKGTSKECNLHSQTIQAVTEELVTRRKQFKKAKLKWRISNKKSARRSLGWVPFKKVAIKYATGYVQYGKHQFKLWDSYGLSKYTLKTGSFVEDSRGRWYVCLVVESPKQDKSTATKAIGIDLGLKDIATCSDGTVISNPKFYRKYEQTLGIAQRARNKKRVRALHAKIANSRKDHLHKASTKLVNENALIIVGDLSAKKLVKTKMAKSVLDTGFSALKTMLKYKCENAGVLFEEVQEAYTTQICSCCGEITSSSPKGSTDLGIREWECMSCGTAHDRDINSALNILALGHKRLAVGITLF

SEQ ID NO: 4386 - protein, 353 aa, unidentified
MKTLKLRIKDKHCKVLDQLASEVNFVWNYVNDLGFRHLKRKGEFLSAFDIAKYTKGTSKECNLHSQTIQAVTEELVTRRKQFKKAKLKWRVSNKKSARRSLGWVPFKKLAIKYANGYVQYGKHQFKLWDSYGLSKYTLKTGSFVEDSRGRWYVCLVVESPKQDKSTATKAIGIDLGLKDIATCSDGTVISNPKFYRKYEQTLGIAQRARNKKRVRALHAKIANSRKDHLHKASTKLVNENALIIVGDLSAKKLVKTKMAKSVLDTGFSALKTMLKYKCENAGVLFEEVQEAYTTQLCSCCGEITSSSPKGSTDLGIREWECMSCGTAHDRDINSALNILALGHKRLAVGITLF

SEQ ID NO: 4387 - protein, 353 aa, unidentified
MKTLKLRIKDKHCKVLDQLASEVNFVWNYVNDLGFRHLKRKGEFLSAFDIAKYTKGTSKECNLHSQTIQAVTEELVTRRKQFKKAKLKWRISNKKSARRSLGWVPFKKVAIKYATGYVQYGKHQFKLWDSYGLSKYTLKTGSFVEDSRGRWYVCLVVESPKQDKSTATKSIGIDLGLKDIATCSDGTVISNPKFYRKYEQTLGIAQRARNKKRVRALHAKIANSRKDHLHKASTKLVNENALIIVGDLSAKKLVKTKMEKSVLDTGFSALKTMLKYKCENAGVLFEEVQEAYTTQICSCCGEITSSSPKGSTDLGIREWECMSCGTAHDRDINSALNILALGHKRLAVGITLF

SEQ ID NO: 4388 - protein, 358 aa, unidentified
MNKKIHTKTLKVRVRDKHVKTLNAWAFAVNQVWNYCNELSHRAIKERQKWLSGYDLQDYTKGANKELGLNSATIQMIGHEYVTRRKQFKKAKLNWRKSRGAKRSLGWIPVRSDCISFKNGQIYHNRHYFKVWDSYSLSQYQFKSGSFNEDAQGRWYFNAVVEVKPEQSSGTASVGIDLGCKEAATDSNGHKVVGRQYRKLEQQLGIAQRANKKTRVKAIHAKICNRRKDDLHQYSRQLVDSNAAIFVGNVNSLGLTKTKLAKSVLDAGWGMLKTMLEYKCAHAGVVFEVVNERYTTQICSCCGEIPASSPKGRAGLRIREWSCGSCGATHRDVNAAKNILAAGHGRLAVGIPHYSQLV

SEQ ID NO: 4389 - protein, 410 aa, unidentified
MYYAYKYRLEPSDTHREELDRHRDICRQVYNHALYRFNQIPEVAGTLNQRVRSIRDELPALKDWWSGLSDVYSTVLQTAVMRIEENIKSLGKLKEKGYGVGQLKWKPPREFRSFTYSQSGFKLDKKGGQTVLSLSKLADIPIRLHRAIPDDAKLKQVTLKKEPTGEWFATFGVEVDREPPEKPDEITDVVGIDVGILKYTHDTDGTAVESVDLSDERERLEREQRKLSRKQHGSNNYEKQRRRVAECHSDLRRKRRDFLHKLSNYYAKEYDLVAVEDLNVAGMMQFDSNSRNRASAAWGTFLRMLEYKCEREGTHYVPVNPRGTTKECSACGVSSDKPLWVREHSCPSCGFTADRDGNAAYNILVRGLKKVGVGCSESPPVETALPTGTAVVPAKRVLEAGSPVLTARSA

SEQ ID NO: 4390 - protein, 413 aa, unidentified
MNYNYRYQLKPSKSQRETLDYHRDTCRQLYNHALYRFNQIPQDEGTVKQRVRKIRDELPDLKDWWEALTDVYSKVLQPTVMRIAHNVKALGKLKEQGYTVGKLRWKSPREFHSFTYNQSGFELDKKGGQTVLSLSKLADIPITLHRPVPDGATIKEVTLKKEPTGEWFAIFGIEHDSEPPAKPANPKKCVGIDVGILKYAHDTDGFAVGSLDLSDKRERLEREQRTLSRKEHGSNNWENQRQCVAECHQRIKRKRRDFLHRLSAYYAREYDLVAVEDLDVRGMLESPRNSRNTASAAWHTFRRMLEYKCKHEGTYFVAVESDGTTKECAKCGVETEKPLWVREHSCPACGFEADRDANAAWNVLSRGLSELGVVQSEGTPVETALSTGTDSVPAKRVVEAGSPALKERAKASE

SEQ ID NO: 4391 - protein, 385 aa, unidentified
MIKTQVVKLKVNKTMQKHLDALCDYRRYCWNKGLETWQLMYEAHTLNKKDNPSPNERRVRDELVANKADWQYDLSARCLQLAIKDLANAWKNFFDKSQPDWGIHSFKSKKAPRQGFKTDRAKIVNGRLRLDRPRSISKADWFDLKSYEALKMNEVKVISIFKEKGAYYAALTYEEEPISKTKTHQKTAVDVNVGHFNYTDGKINVLPAKLQKLYKRIKHYQRMLARKREVNGKLATKSNNYFAVRTKLQRDYRKVANIQNDLLQQFTTKLVDNYDQIVIEDLAVKQMMMTHVASKGMQRSLFSRFRQILTYKCNWYGKELILADKTYPSTQRCAACGYVKKGEEKITLQGNKKHGTKHNEYICYECGYKNDRDKNAVLNLLALAR

SEQ ID NO: 4392 - protein, 439 aa, unidentified
MHYAYRFRLKPTAKQRELLDYHRDTCRQLYNHALREFNKIPESDGTLNQRVRQVRDQLTDLKDWWDELNDLYSTVAQAAVMRIEDSIKALSELKEKGYNVGSLNWKAPRDFRSFTYVQSGFEFDKQNGQTVLSLSKLADIPIECHRDIPDGETIKEVTLKKEPTGEWYASFAVDDKEEPSKPSLAEIDADEMVGIDVGILKYAHDTDGTAVGSLDLADERDRLEREQRKLSRKEHGSNNWEKQRRRVAERHQQIKRKRRDFLHKLSNYYAREYNLVAVEDLDVKGMLESPGNSRNTASAAWDTFTDLLEYKCKREGTHFVAVDPEDTTKECASCGVKTDKPLWVREHSCPACRFEADRDANAAWNVLSRGLTDIGVGHSELTSSESPCDSDGLRKSLSDFRTPVETALPTGTAVVPAKRVLEAGSPCLKESPTAASRQG

SEQ ID NO: 4393 - protein, 432 aa, unidentified
MAEQIEEVPAELIQTRVYELHPNKTMRRVLDEACDYRRYCWNQGLALWNEMYKARQTLKSSLSTDSKKLTEEQKVLLKDKPSPSERRVRNMLVADKKDWQYAQSARILQLAISDLGKAWNNFFDKAQPGWGKPKFRSKREARQGFKSDQSKIKDGILYLERAKESSVPKDQWRGFKLSEKPLSDEFGVVSYFKEKGRYYVAIPYKIKAKDIKLPDKTGKATAVDVNVGHFDYTGGRINVLPKKLDKIYGKIKHYQRQLAKKQVKNGEAACESENYLKTKAKLQACYRKASNIQNDLMQKFTTELVNNYDKIVIENLSVKGMLMSHVASKGVHRSMFGKFKQFLTYKCDWYGKELILANKQYPSTQRCAACGNVKKGDDKITLYGNKKHGTKHNEYVCYNQKCPNYNKVVDRDKNAMLSLLALTEHPELNHAL

SEQ ID NO: 4394 - protein, 429 aa, unidentified
MAEQVKEAPAELIQTRVYELRPNKTMRKVLDEACDYRRYCWNQGLALWNEMYKARQTLKSSLSTDFKKLTEEQKVLLKDKPSPSERRVRNMLVADKKDWQYTQSARILQLAISDLGKAWNNFFDKAQPGWCKPKFRSKREARQGFKSDRSKIKDGILYLERARGSRVPKDQWRGFKLSEKPLSDEFGVVSYFKEKGRYYVAISYKIKAEDVKLPDKTGKATAVDVNVGHFDYTGGRVNVLPKKLDRIYKKIKHYQRQLAKKQVKNGEAACESENYLKTKAKLQACYRKASNIQNDLMHKFTTELVNDYDKIVIENLSVKGMLMSHVASKGVHRSMFGKFKQILTYKCDWYGKELILANKLYPSTQRCAACGNVKKGDDKITLYGNKKHGTKHNEYVCYNEKCPNYNNRDKNAMLSLLALTEHPELNHAL

SEQ ID NO: 4395 - protein, 432 aa, unidentified
MAEQVKEAPAELIQTRVYELRPNKTMRKVLDEACDYRRYCWNQGLALWNEMYKARQTLKSSLSTDSKKLTEEQKVLLKDKPSPSERRVRNMLVADKKDWQYTQSARILQLAISDLGKAWNNFFDKAQPGWCKPKFRSKREARQGFKSDQSKIKDGILYLERAKESSVPKDQWRGFKLSEKPLSDEFGVVSYFKEKGRYYVAIPYKIKAEDIKLPDKTGKATAVDVNVGHFDYTGGRMNVLPKKLDKIYGKIKHYQRQLAKKQVKNGEAACESENYLKTKAKLQACYRKASNIQNDLIQKFTTELVNNYDKIVIENLSVKGMLISHVASKGVHRSLFGKFKQFLTYKCDWYGKELILANKLYPSTQRCAACGNVKKGDDKITLYGNKKHGTKHNEYVCYNQKCPNYNKVVDRDKNAMLSLLALTEHPELNHAL

SEQ ID NO: 4396 - protein, 432 aa, unidentified
MAEQVKEAPAELIQTRVYELRPNKTMRKFLDEACDYRRYCWNQGLALWNEMYKARQTLKSSLSTDSKKLTEEQKVLLKDKPSPSERRVRNMLVADKKDWQYTQSARILQLAISDLGKAWNNFFDKAQSGWGKPKFRSKREARQGFKSDQSKIKDGILYLERAKESSVPKDQWRGFKLSEKPLSDEFGVVSYFKEKGRYYVAIPYKIKAEDIKLPDKTGKATAVDVNVGHFDYTGGRMNVLPKKLDKIYGKIKHYQRQLAKKQVKNGEAACESENYLKTKAKLQACYRKASNIQNDLMQKFTTELVNNYDKIVIENLSVKGMLMSHVASKGVHRSMFGKFKQFLTYKCDWYGKELILANKLYPSTQRCAACGNVKKGDDKITLYGNKKHGTKHNEYVCYNQKCPNYNKVVDRDKNAMLSLLALTEHPELNHAL

SEQ ID NO: 4397 - protein, 432 aa, unidentified
MAEQIEEVPAELIQTRVYELHPNKTMRRVLDEACDYRRYCWNQGLALWNEMYKARQTLKSSLSTDSKKLTEEQKVLLKDKPSPSERRVRNMLVADKKDWQYAQSARILQLAISDLGKAWNNFFDKAQPGWGKPKFRSKREARQGFKSDQSKIKDGILYLERAKESSVPKDQWRGFKLSEKPLSDEFGVVSYFKEKGRYYVAIPYKIKAKDIKLPDKTGKATAVDVNVGHFDYTGGRINVLPKKLDKIYGKIKHYQRQLAKKQVKNGEAACESENYLKTKAKLQACYRKASNIQNDLMQKFTTELVNNYDKIVIENLSVKGMLMSHVASKGVHRSMFGKFKQILTYKCDWYGKDLILANKLYPSTQRCAACGNVKKGDDKITLYGNKTHGTKHNEYVCYNQKCPNYNKVVDRDKNAMLSLLALTEHPELNHAL

SEQ ID NO: 4398 - protein, 432 aa, unidentified
MAEQIEEVPAELIQTRVYELHPNKTMRKVLDEACDYRRYCWNQGLALWNEMYKARKAIKSSLASDPKKLTEEQKVLLKEKPSPSERRVRNMLVADKKDWQYTQSARILQLAISDLGKAWNNFFDKAQPGWGKPKFRSKREARQGFKSDRSKIKDGILYLERARRSSVPKDQWCGFKLSEKPLSDEFGVVSYFKEKGRYYVAIPYKIKAEDVKLPDKTGKATAVDVNVGHFDYTGGRVNVLPKRLDRIYKKIKHYQRQLAKKRVKNGEAACESINYLKTKAKLQACYRKAGNIQNDLMHKFTTELINDYDKIVIENLSVKGMLMSHVASKGVHRSMFGKFRQILTYKCDWYGKELILANKLYPSTQRCAACGNVKKGDDKITLYGNKKHGTKHNEYVCYNEKCPNYNKVVDRDKNAMLSLLALTEHPELNHAL

SEQ ID NO: 4399 - protein, 432 aa, unidentified
MAEQIEEVPAELIQTRVYELHPNKTMRRVLDEACDYRRYCWNQGLALWNKMYKARQALKSSLASDSKKLTEEQKVLLKEKPSPSERRVRNMLVTDKKDWQYTQSARILQLAISDLGKAWNNFFDKAQPGWGKPKFRSKREARQGFKSDRSKIKDGILYLERAKESSVPKDQWRGFKLSEEPLSDEFGVVSYFKEKGRYYVAIPYKIKAEDVKLPDKTGKATAVDVNVGHFDYTGGRVNVLPKKLDRIYKKIKHYQRQLAKKQVQNGAAACESKNYLKTKAKLQACYRKASNIQNDLMHKFTTELVNDYDKIVIENLSVKGMLMSHVASKGVHRSMFGKFKQFLTYKCDWYGKELILANKLYPSTQRCAACGNVKKGDDKITLYGNKKHGTKHNEYVCYNQKCPNYNKVVDRDKNAMLSLLALTEHPELNHAL

SEQ ID NO: 4400 - protein, 432 aa, unidentified
MAEQIEEVPAELIQTRVYELHPNKTMRRVLDEACDYRRYCWNQGLALWNKMYKARQALKSSLASDSKKLTEEQKVLLKEKPSPSERRVRNMLVTDKKDWQYTQSARILQLAIYDLGKAWNNFFDKAQPGWGKPKFRSKREARQGFKSDRSKIKDGILYLERAKESSVPKDQWRGFKLSEEPLSDEFGVVSYFKEKGRYYVAIPYKIKAEDVKLPDKTGKATAVDVNVGHFDYTGGRVNVLPKKLDRIYKKIKHYQRQLAKKQVKNGEAACESENYLKTKAKLQACYRKASNIQNDLMHKFTTELVNDYDKIVIENLSVKGMLMSHVASKGVHRSMFGKFKQILTYKCDWYGKELILANKLYPSTQRCAACGNVKKGDDKITLYGNKKHGTKHNEYVCYNEKCPNYNKVVDRDKNAMLSLLALTEHPELNHAL

SEQ ID NO: 4401 - protein, 432 aa, unidentified
MAEQIEEVPAELIQTRVYELHPNKTMRRVLDEACDYRRYCWNQGLALWNEMYKARQTLKSSLSTDSKKLTEEQKVLLKDKPSPSERRVRNMLVADKKDWQYAQSARILQLAISDLGKAWNNFFDKAQPGWGKPKFRSKREARQGFKSDQSKIKDGILYLERAKESSVPKDQWRGFKLSEKPLSDEFGVVSYFKEKGRYYVAIPYKIKAKDIKLPDKTGKATAVDVNVGHFDYTGGRINVLPKKLDKIYGKIKHYQRQLAKKQVKNGEAACESENYLKTKAKLQACYRKASNIQNDLMQKFTTELVNNYDKIVIENLSVKGMLMSHVASKGVHRSMFGKFKQFLTYKCDLYGKELILANKQYPSTQRCAACGNVKKGDDKITLYVNKKHGTKHNEYVCYNQKCPNYNKVVDRDKNAMLSLLALTEHPELNHAL

SEQ ID NO: 4402 - protein, 432 aa, unidentified
MAEQVKEAPAELIQTRVYELRPNKTMRKVLDEACDYGRYCWNQGLALWNEMYKARQTLKSSLSTDSKKLTEEQKVLLKDKPSPSERRVRNMLVADKKDWQYTQSARILQLAISDLGKAWNNFFDKAQPGWGKPKFRSKREARQGFKSDRSKIKDGILYLERAKESSVPKDQWRGFKLSEKPLSDEFGVVSYFKEKGRYYVAIPYKIKAEDIKLPDKTGKATAVDVNVGHFDYTGGRMNVLPKKLDKIYGKIKHYQRQLAKKQVKNGEAACESENYLKTKAKLQACYRKASNIQNDLMQKFTTELVNNYDKIVIENLSVKGMLMSHVASKGVHRSMFGKFKQFLTYKCDWYGKELILANKLYPSTQRCATCGNVKKGDDKITLYGNKKHGTKHNEYVCYNQKCPNYNKVVDRDKNAMLSLLALTEHPELNHAL

SEQ ID NO: 4403 - protein, 432 aa, unidentified
MAEQIEEVPAELIQTRVYELHPNKTMRKVLDEACDYRRYCWNQGLALWNEMYKARKAIKSSLASDPKKLTEEQKVLLKEKPSPSERRVRNMLVADKKDWQYTQSARILQLAISDLGKAWNNFFDKAQPGWGKPKFRSKREARQGFKSDRSKIKDGILYLERARRSSVPKDQWCGFKLSEKPLSDEFGVVSYFKEKGRYYVAIPYKIKAEDVKLPDKTGKATAVDVNVGHFDYTGGRVNVLPKRLDRIYKKIKHYQRQLAKKRVKNGEAACESINYLKTKAKRQACYRKAGNIQNDLMHKFTTELINDYDKIVIENLSVKGMLMSHVASKGVHRSMFGKFRQILTYKCDWYGKELILANKLYPSTQRCAACGNVKKGDDKITLYGNKKHGTKHNEYVCYNEKCPNYNKVVDRDKNAMLSLLALTEHPELNHAL

SEQ ID NO: 4404 - protein, 432 aa, unidentified
MAEQIEEVPAELIQTRVYELHPNKTMRKVLDEACDYRRYCWNQGLALWNEMYKARQTLKSSLASDSKRLTEEQKVLLKEKPSPSERRVRNMLVADKKDWQYAQSARILQLAISDLGKAWNNFFDKAQPGWGKPKFRSKREARQGFKSDRSKIKDGILYLELARRSSVPKDQWRGFKLSEKPLSDEFGVVSYFKEKGRYYVAIPYKIKAEDVKLPDKTGKATAVDVNVGHFDYTGGRVNVLPKRLDRIYKKIKHYQRQLAKKRVKNGEAACESINYLKTKAKLQACYRKAGNIQNDLMHKFTTELINDYDKIVIENLSVKGMLMSHVASKGVHRSMFGKFKQILTYKCDWYGKDLILANKLYPSTQRCAACGNVKKGDDKITLYGNKKHGTKHNEYICYNKKCPNYNKVVDRDKNAMISLLALTEHPELNHAL

SEQ ID NO: 4405 - protein, 432 aa, unidentified
MAEQIEEVPAELIQTRVYELHPNKTMRKVLDEACDYRRYCWNQGLALWNEMYKARQTLKSSLASDSKRLTEEQKVLLKEKPSPSERRVRNMLVADKKDWQYAQSARILQLAISDLGKAWNNFFDKAQPGWGKPKFRSKREARQGFKSDRSKIKEGILYLERARGSSVPKDQWRGFKLSEKPLSDEFGVVSYFKEKGRYYVAIPYKIKVEDVKQPDKTGKATAVDVNVGHFDYTGGRVNVLPKKLDRTYKKIKHYQRQLAKKQVKNGEAACESKNYLKTKAKLQAYYRKASNIQNDLMQKFTTELVKDYDKIVIENLSVKGMLMSHVASKGVHRSMFGKFKQILTYKCDWYGKDLILANKLYPSTQRCAACGNVKKGDDKITLYGNKTHGTKHNEYVCYNEKCPNYNKIVDRDKNAMLSLLALTEYPELNHAL

SEQ ID NO: 4406 - protein, 432 aa, unidentified
MAEQVKEAPAELIQTRVYELRPNKTMRKVLDEACDYRRYCWNQGLALWNEMYKARQTLKSSLSTDSKKLTEEQKVLLKDKPSPSERRVRNMLVADKKDWQYTQSARILQLAISDLGKAWNNFFDKAQPGWGKPKFRSKREARQGFKSDQSKIKDGILYLERARGSSVPKDQWRGFKLSEKPLSDEFGVVSYFKEKGRYYVAIPYKIKAEDIKLPDKTGKATAVDVNVGHFDYTGGRMNVLPKKLDKIYGKIKHYQRQLAKKQVKNGEAACESENYLKTKAKLQACYRKASNIQNDLMQKFTTELVNNYDKIVIENLSVKGMLMSHVASKGVHRSMFGKFKQFLTYKCDWYGKELILANKLYPSTQRCAACGNVKKGDDKITLYGNKKHGTKHNEYVCYNQKCPNYNKVVDRDKNAMLSLLALTEHPELNHAL

SEQ ID NO: 4407 - protein, 432 aa, unidentified
MAEQVKEAPAELIQTRVYELRPNKTMRKVLDEACDYRRYCWNQGLALWNEMYKARQTLKSSLASDSKKLTEEQKVLLKDKPSPSERRVRNMLVADKKDWQYAQSARILQLAISDLGKAWNNFFDKAQPGWGKPKFRSKREARQGFKSDRSKIKDGILYLERARGSRVPKDQWRGFKLSEKPLSDEFGVVSYFKEKGRYYVAIPYKIKAEDIKLPDKTGKATAVDVNVGHFDYTGGRMNVLPKKLDKIYGKIKHYQRQLAKKQFKNGEAACESENYLKTKAKLQACYRKASNIQNDLMQKFTTELVNNYDKIVIENLSVKGMLMSHVASKGVHRSMFGKFKQFLTYKCDWYGKELILANKLYPSTQRCAACGNVKKGDDKITLYGNKKHGTKHNEYVCYNQKCPNYNKVVDRDKNAMLSLLALTEHPELNHAL

SEQ ID NO: 4408 - protein, 432 aa, unidentified
MAEQIEEVPAELIQTRVYELHPNKTMRRVLDEACDYRRYCWNQGLALWNEMYKARQALKSSLASDSKRLTEEQKVLLKEKPSPSERRVRNMLVTDKKDWQYTQSARILQLAISDLGKAWNNFFDKAQPGWGKPKFRSKREARQGFKSDRSKIKDGILYLERAKESSVPKDQWRGFKLSEKPLSDEFGVVSYFKEKGRYYVAIPYKIKAEDIKLPDKTGKATAVDVNVGHFDYTGGRMNVLPKKLDKIYGKIKHYQRQLAKKRVQNGEAACESENYLKTKAKLQACYRKASNIQNDLMHKFTTELVKDYDKIVIENLSVKGMLMSHVASKGVHRSMFGKFKQILTYKCDWYGKELILANKLYPSTQRCAACGNVKKGDDKITLYGNKKHGTKHNEYVCYNEKCPNYNKVVDRDKNAMLSLLALTEHPELNHAL

SEQ ID NO: 4409 - protein, 432 aa, unidentified
MAEQIEEVPAELIQTRVYELHPNKTMRRVLDEACDYRRYCWNQGLALWNEMYKARQTLKSSLSTDSKKLTEEQKVLLKDKPSPSERRVRNMLVADKKDWQYAQSARILQLAISDLGKAWNNFFDKAQPGWGKPKFRSKREARQGFKSDQSKIKDGILYLERAKESSVPKDQWRGFKLSEKPLSDEFGVVSYFKEKGRYYVAIPYKIKAKDIKLPDKTGKATAVDVNVGHFDYTGGRINVLPKKLDKIYGKIKHYQRQLAKKQVKNGEAACESENYLKTKAKLQACYRKASNIQNDLMQKFTTELVNNYDKIVIENLSVKGMLMSHVASKGVHRSMFGKFKQFLTYKCDWYGKELILANKQYPSTQRCAAYGNVKKGDDKITLYGNKKHGTKHNEYVCYNQKCPNYNKVVDRDKNAMLSLLALTEHPELNHAL

SEQ ID NO: 4410 - protein, 432 aa, unidentified
MAEHIEEVPAELIRTRVYELHPNKTMRKVLDEACDYRRYCWNQGLALWNEMYKARKAIKSSLASDPKKLTEEQKVLLKEKPSPSERRVRNMLVADKKDWQYTQSARILQLAISDLGKAWNNFFDKAQPGWGKPKFRSKREARQGFKSDRSKIKDGILYLERARRSSVPKDQWCGFKLSEKPLSDEFGVVSYFKEKGRYYVAIPYKIKAEDVKLPDKTGKATAVDVNVGHFDYTGGRVNVLPKRLDRIYKKIKHYQRQLAKKRVKNGEAACESINYLKTKAKLQACYRKAGNIQNDLMHKFTTELINDYDKIVIENLSVKGMLMSHVASKGVHRSMFGKFRQILTYKCDWYGKELILANKLYPSTQRCAACGNVKKGDDKITLYGNKKHGTKHNEYVCYNEKCPNYNKVVDRDKNAMLSLLALTEHPELNHAL

SEQ ID NO: 4411 - protein, 432 aa, unidentified
MAEQIEEVPAELIQTRVYELHPNKTMRRVLDEACDYRRYCWNQGLALWNEMYKARQTLKSSLASDSKRLTEEQKVLLKEKPSPSERRVRNMLVADKKDWQYAQSARILQLAISDLGKAWNNFFDKAQPGWSKPKFRSKREARQGFKSDRSKIKDGILYLERAKESSVPKDQWRGFKLSEEPLSDEFGVASYFKEKGRYYVAIPYKIKAEDVKLPDKTGKATAVDVNVGHFDYTGGRVNVLPKKLDRIYKKIKHYQRQLAKKRVQNGEAACESKNYLKTKAKLQACYRKASNIQNDLMQKFTTELVNDYDKIVIENLSVKGMLMSHVASKGVHRSMFGKFKQILTYKCDWYGKDLILANKLYPSTQRCAACGNVKKGDDKITLYGNKKHGTKHNEYVCYNEKCPNYNKVVDRDKNAMLSLLALTEYPELNHAL

SEQ ID NO: 4412 - protein, 432 aa, unidentified
MAEQIEEVPAELIQTRVYELHPNKTMRRALDEACDYRRYCWNQGLALWNEMYKARQTLKSSLASDSKRLTEEQKVLLKEKPSPSERRVRNMLVADKKDWQYAQSARILQLAISDLGKAWNNFFDKAQPGWGKPKFRSKREARQGFKSDRSKIKEGILYLERARGSSVPKDQWRGFKLREKPLSDEFGVVSYFKEKGRYYVAIPYKIKVEDVKQPDKTGKATAVDVNVGHFDYTGGRVNVLPKKLDRIYKKIKHYQRQLAKKRVKNGEAACESKNYLKTKAKLQACYRKASNIQNDLMHKFTTELVNDYDKIVIENLSVKGMLMSHVASKGVHRSMFGKFKQILTYKCDWYGKDLILANKLYPSTQRCAACGNVKKGDDKITLYGNKKHGTKHNEYVCYNEKCPNYNKVVDRDKNAMLSLLALTEYPELNHAL

SEQ ID NO: 4413 - protein, 432 aa, unidentified
MAEQIEEVPAELIQTRVYELHPNKTMRRVLDEACDYRRYCWNQGLALWNEMYKARQALKSSLASDSKRLTEEQKVLLKEKPSPSERRVRNMLVTDKKDWQYTQSARILQLAISDLGKAWNNFFDKAQPGWGKPKFRSKREARQGFKSDRSKIKDGILYLERAKESSVPKDQWRGFKLSEEPLSDEFGVVSYFKEKGRYYVAIPYKIKAEDVKLPDKTGKATAVDVNVGHFDYTGGRVNVLPKKLDRTYKKIKHYQRQLAKKRVQNGEAACESKNYLKTKAKLQAYYRKASNIQNDLMQKFTTELVKDYDKIVIENLSVKGMLMSHVASKGVHRSMFGKFKQILTYKCDWYGKDLILANKLYPSTQRCAACGNVKKGDDKITLYGNKKRGTKHNEYVCYNEKCPNYNKVVDRDKNAMLSLLALTEHPELNHAL

SEQ ID NO: 4414 - protein, 432 aa, unidentified
MAEQIEEVPAELIQTRVYELHPNKTMRKVLDEACDYRRYCWNQGLALWNEMYKARQTLKSSLASDSKKLTEEQKVLLKEKPSPSERRVRNMLVADKKDWQYAQSARILQLAISDLGKAWNNFFDKAQPGWGKPKFRSKREARQGFKSDRSKIKEGILYLERARGSSVPKDQWRGFKLSEKPLSDEFGVVSYFKEKSRYYVAIPYKIKVEDVKQPDKTGKATAVDVNVGHFDYTGGRVNVLPKKLDRIYKKIKHYQRQLAKKRVKNGEAACESKNYLKTKAKLQAYYRKASNIQNDLMQKFTTELVKDYDKIVIENLSVKGMLMSHVASKGVHRSMFGKFKQILTYKCDWYGKDLILANKLYPSTQRCAACGNVKKGDDKITLYGNKTHGTKHNEYVCYNEKCPNYNKIVDRDKNAMLSLLALTEYPELNHAL

SEQ ID NO: 4415 - protein, 432 aa, unidentified
MAEQVEEVPAELIQTRAYELRPNETMRRVLDEACDYRRYCWNQGLALWNEMYKARKAIKSSLASDPKKLTEEQKVLLKEKPSPSERRVRNMLVADKKDWQYTQSARILQLAISDLGKAWNNFFDKAQPGWGKPKFRSKREARQGFKSDRSKIKDGILYLERARRSSVPKDQWCGFKLSEKPLSDEFGVVSYFKEKGRYYVAIPYKIKAEDVKLPDKTGKATAVDVNVGHFDYTGGRVNVLPKRLDRIYKKIKHYQRQLAKKRVKNGEAACESINYLKTKAKLQACYRKAGNIQNDLMHKFTTELINDYDKIVIENLSVKGMLMSHVASKGVHRSMFGKFRQILTYKCDWYGKELILANKLYPSTQRCAACGNVKKGDDKITLYGNKKHGTKHNEYVCYNEKCPNYNKVVDRDKNAMLSLLALTEHPELNHAL

SEQ ID NO: 4416 - protein, 432 aa, unidentified
MAEQIEEVPAELIQTRVYELHPNKTMRRVLDEACDYRRYCWNQGLALWNEMYKARQTLKSSLSTDSKKLTEEQKVLLKDKPSPSERRVRNMLVADKKDWQYAQSARILQLAISYLGKAWNNFFDKAQPGCGKPKFRSKREARQGFKSDQSKIKDGILYLERAKESSVPKDQWRGFKLSEKPLSDEFGVVSYFKEKGRYYVAIPYKIKAKDIKLPDKTGKATAVDVNVGHFDYTGGRINVLPKKLDKIYGKIKHYQRQLAKKQVKNGEAACESENYLKTKAKLQACYRKASNIQNDLMQKFTTELVNNYDKIVIENLSVKGMLMSHVASKGVHRSMFGKFKQFLTYKCDWYGKELILANKQYPSTQRCAACGNVKKGDDKITLYGNKKHGTKHNEYVCYNQKCPNYNKVVDRDKNAMLSLLALTEYPELNHAL

SEQ ID NO: 4417 - protein, 432 aa, unidentified
MAEQIEEVPAELIQTRVYELHPNKTMRRVLDEACDYRRYCWNQGLALWNEMYKARQALKSSLASDSKRLTEEQKVLLKEKPSPSERRVRNMLVTDKKDWQYTQSARILQLAISDLGKAWNNFFDKAQPGWGKPKFRSKREARQGFKSDRSKIKDGILYLERAKESSVPKDQWRGFKLSEKPLSDEFGVVSYFKEKGRYYVAIPYKIKAEDIKLPDKTGKATAVDVNVGHFDYTGGRMNVLPKKLDKIYGKIKHYQRQLAKKRVQNGEAACESENYLKTKAKLQACYRKASNIQNDLMHKFTTELVKDYDKIVIENLSVKGMLMSHVASKGVHRSMFGKFKQILTYKCDWYGKELILANKLYPSTQRCAACGNVKKGDDKITLYGNKKHGTKHNEYVCYNEKCPNYNKVVDRDKNAMLSLLALTEHPELNHEL

SEQ ID NO: 4418 - protein, 432 aa, unidentified
MAEQIEEVPAELIQTRVYELHPNKTMRRVLDEACNYRRYCWNQGLALWNEMYKARQTLKSSLSTDSKKLTEEQKVLLKDKPSPSERRVRNMLVADKKDWQYAQSARILQLAISDLGKAWNNFFDKAQPGWGKPKFRSKREARQGFKSDQSKIKDGILYLERAKESSVPKDQWRGFKLSEKPLSDEFGVVSYFKEKGRYYVAIPYKIKAKDIKLPDKTGKATAVDVNVGHFDYTGGRINVLPKKLDKIYGKIKHYQRQLAKKQVKNGEAACESENYLKTKAKLQACYRKASNIQNDLMQKFTTELVNNYDKIVIENLSVKGMLMSHVASKGVHRSMFGKFKQFLTYKCDWYGKELILANKQYPSTQRCAACGNVKKGDDKITLYGNKKHGTKHNEYVCYNQKCPNYNKVVDRDKNAMLSLLALTEHPELNHAL

SEQ ID NO: 4419 - protein, 432 aa, unidentified
MAEQIEEVPAELIQTRVYELHPNKTMRRVLDEACDYRRYCWNQGLALWNEMYKARQTLKSSLSTDSKKLTEEQKVLLKDKPSPSERRVRNMLVADKKDWQYAQSTRILQLAISDLGKAWNNFFDKAQPGWGKPKFRSKREARQGFKSDQSKIKDGILYLERAKESSVPKDQWRGFKLSEKPLSDEFGVVSYFKEKGRYYVAIPYKIKAKDIKLPDKTGKATAVDVNVGHFDYTGGRINVLPKKLDKIYGKIKHYQRQLAKKQVKNGEAACESENYLKTKAKLQACYRKASNIQNDLMQKFTTELVNNYDKIVIENLSVKGMLMSHVASKGVHRSMFGKFKQFLTYKCDWYGKELILANKQYPSTQRCAACGNVKKGDDKITLYGNKKHGTKHNEYVCYNQKCPNYNKVVDRDKNAMLSLLALTEHPELNHAL

SEQ ID NO: 4420 - protein, 432 aa, unidentified
MAEQIEEVPAELIQTRVYELHPNKTMRKVLDEACDYRRYCWNQGLALWNEMYKARQTLKSSLASDSKRLTEEQKVLLKEKPSPSERRVRNMLVADKKDWQYAQSARILQLAISDLGKAWNNFFDKAQPGWGKPKFRSKREARQGFKSDRSKIKEGILYLERARGSSVPKDQWRGFKLSEKPLSDEFGVVSYFKEKSRYYVAIPYKIKVEDVKQPDKTGKATAVDVNVGHFDYTGGRVNVLPKKLDRIYKKIKHYQRQLAKKRVKNGEAACESKNYLKTKAKLQAYYRKASNIQNDLMQKFTTELVKDYDKIVIENLSVKGMLMSHVASKGVHRSMFGKFKQILTYKCDWYGKDLILANKLYPSTQRCAACGNVKKGDDKITLYGNKTHGTKHNEYVCYNEKCPNYNKVVDRDKNAMLSLLALTEHPELNHAL

SEQ ID NO: 4421 - protein, 450 aa, unidentified
MNMIEARKNKIKDSLNKTKIKRKSQSAVIIKAKLDSDKLNTSTLRILRRIFLEAKWLYNYIINKEFNNDIFNMDYKVNKVPVYVKDHYEIRDLKYLSSQMREEIIDRTMDNIKGLSKLKEKGYKIGKLKFKKYITSIPLKQYNNTYKIINNNYIKIQGIKQKLKVNGLYNLNILEPANALLINKNNNYYIYITAYKNKYILDKPINNQKIVSVDLGIKNQLTLSNGLIINYGIPKSKREKRIQRRLSKKIKNSNNYYKLKNKLNIEQTKTVNRRKDTVNKIAHYLSSNYDIIITQDDNINSWKHLFGKRTESTNMGGIKEALKHKASTFILLDRFLPTTKECSKCHNKYNINLNDRIYKCPNCGFIINRDYNSTLNDLYYGIIKINELLRNKYNKLKRYFNELNLNINVPVDHREFTPVETFTSVPEGINISPYVRISVVNESGSLIALA

SEQ ID NO: 4422 - protein, 442 aa, unidentified
MNMIEARKNKIKDSLNKTKERRKSQSAAIIKAKIDSDRLNTNTSRILRRIFLEAKWLYNYIINKEFNNDIFNMDYKVNKVPVYVKDHYEIRDLKYLSSQIKEEIIDRTMDNIKGLSKLKENGYKTGKLKFKKYITSIPLKQYNNAYKIINNNSIKIQGIKQKLKVNGLYNLNILEPANALLINKNNNYYIYITAYKNKYIMEKPINNQKIVLVDLGIKNQLTLSNGLIINYGIPKSKREKRIQRRLSKKVKNSNNYYKLKNKLNIEQTKNANKRKDTVNKIVHYLSSNYDIVITQDDNINSWKHLFGKRTESTNMGGIKEALKHKASTFILLDRFLPTTKECSKCHNKYNINLNDRIYKCPNCGFIINRDYNSTLNDLYYGIIKINELLRNKYNKLKRYFNELNLNINVPVETFTSVPEGINISPYVRISVVDESGSLIALA

SEQ ID NO: 4423 - protein, 359 aa, unidentified
MEAKKNKIKDSLNKTKERRKSQSAVIIKAKIDSDKLNTSTLRILRRIFLEVKWLYNYIINKEFNNDIFNMDYKVNKVPVYVKDHYEIRDLKYLSSQIKEEIIDRTMDNIKGLSKLKENGYKTGKLKFKKYITSIPLKQYNNAYKIINNNSIKIQGIKQKLKVNGLYNLNILEPANALLINKNNDYYIYITAYKNKYILDKPINKQKIVLVDLGIKNQLTLSNGLIINYGIPKSKREKRIQKRLSKKVKNSNNYYKLKNRLNIEQTKNANKRKDTVNKIVHYLSSNYDIVITQDDNINSWKHLFGKRTESTNMGGIKEALKHKASTFILLDRFLPTTKECSKCHNKYNINLNDRIYKCPN

SEQ ID NO: 4424 - protein, 234 aa, unidentified
MIKTQVVKLKVNKTMQKHLDALCDYRRYCWNKGLETWQLMYEAHTLNKKDNPSPNERRVRDELVANKADWQYDLSARCLQLAIKDLANAWKNFFDKAQPDWGIPSFKSKKSPRQGFKTDRAKIVNGKLRLDRPRSISKDSWHDLSSYEVLKMSEVKVVSIFKEKGAYYAALTYEEEPISKTKTHQKTAVDVNVGHFNYTDGKINVLPAKLQKLYKRIKHYQRMLARKREVNGKL

SEQ ID NO: 4425 - protein, 432 aa, unidentified
MAEQVKEAPAELIQTRVYELRPNKTMRKVLDEACDYRRYCWNQGLALWNEMYKARQTLKSSLSTDSKKLTEEQKVLLKDKPSPSERRVRNMLVADKKDWQYTQSARILQLAISDLGKAWNNFFDKAQLGWGKPKFRSKREARQGFKSDQSKIKDGILYLERAKESSVPKDQWRGFKLSEKPLSDEFGVVSYFKEKGRYYVAIPYKIKAEDIKLPDKTGKATAVDVNVGHFDYTGGRMNVLPKKLDKIYGKIKHYQRQLAKKQVKNGEAACESENYLKTKAKLQACYRKASNIQNDLMQKFTTELVNNYDKIVIENLSVKGMLMSHVASKGVHRSMFGKFKQILTYKCDWYGKELILANKLYPSTQRCAACGNVKKGDDKITLYGNKKHGTKHNEYVCYNQKCPNYNKVVDRDKNAMLSLLALTEHPELNHAL

SEQ ID NO: 4426 - protein, 432 aa, unidentified
MEEQIEEVPAELIQTRVYELHPNKTMRRVLDEACDYRRYCWNQGLALWNEMYKARQTLKSSLASDSKRLTEEQKVLLKEKPSPSERRVRNMLVADKKDWQYAQSARILQLAISDLGKAWNNFFDKAQLGWGKPKFRSKREARQGFKSDRSKIKDGILYLERARGSSVPKDQWRGFKLSEKPLSDEFGVVSYFKEKGRYYVAIPYKIKAEDIKLPDKTGKATAVDVNVGHFDYTGGRVNVLPKKLDRTYKKIKHYQRQLAKKRVQNGEAACESKNYLKTKAKLQAYYRKASNIQNDLMQKFTTELVKEYDKIVIENLSVKGMLMSHVASKGVHRSMFGKFKQILTYKCDWYGKDLILANKLYPSTQRCAACGNVKKGDDKITLYGNKKHGTKHNEYVCYNEKCPNYNKVVDRDKNAMLSLLALTEHPELNHAL

SEQ ID NO: 4427 - protein, 407 aa, unidentified
MATLRKGSGDAGHVRYTYRLRMSSTARTALRAEWDRCRWVWNECVAKSRQVHVHNRQHPEKQTCGPAQLDKMLTEARAKTPWLCEGASVPQQQTIRDFAKARSKALKDIEKRLPVWQRAGMPRPKKKREALPTLNYTTRGFRLKDGRLHLAGGIVVTVVWSRELPSAPSSVRVYRDSLGHWYASFVVAAETRPLPATGRVIGVDWGVKETATTTSDDHDLPHVQHGKTAAQRLARYQRMMGRRKPARGQAASRGYREARRQAAKMHKKVARRRQDTARKWAKKVVRDHDAIAVEDFRPKFLARTTMARKAADAAISTTKTTLIEMGRKHGRDVRLVYPAHTTMDCASCGARTKHALPLSERTYTCTACGVMSPRDKNSARVMLVRAGLIPAGAEGVRPPGALLPEGA

SEQ ID NO: 4428 - protein, 432 aa, unidentified
MAEQVEEVPAELIQTRVYELHPNKTMRRVLDEACDYRRYCWNQGLALWNEMYKARQTLKSSLASDSKRLTEEQKVLLKEKPSPSERRVRNMLVADKKDWQYAQSARILQLAISDLGKAWNNFFDKAQPGWGKPKFRSKREARQGFKSDRSKIKEGILYLERARGSSVPKDQWRGFKLSEKPLSDEFGVVSYFKEKGRYYVAIPYKIKVEDIKQPDKIGKATAVDVNVGHFDYTGGRVNVLPKKLDRTYKKTKHYQRQLAKKRVQNGEAACESKNYLKTKAKLQAYYRKASNIQNDLMHKFTTELVNDYDKIVIENLSVKGMLMSHVASKGVHRSMFGKFKQILTYKCDWYGKELILANKLYPSTQRCAACGNVKKGDDKITLYGNKKHGTKHNEYVCYNEKCPNYNKIVDRDKNAMLSLLALTEYPELNHAL

SEQ ID NO: 4429 - protein, 432 aa, unidentified
MAEQVKEAPAELIQTRVYELRPNKTMRKVLDEACDYRRYCWNQGLPLWNEMYKARQTLKSSLSTDSKKLTEEQKVLLKDKPSPSERRVRNMLVADKKDWQYTQSARILQLAISDLGKAWNNFFDKAQPGWGKPKFRSKREARQGFKSDQSKIKDGILYLERAKESSVPKDQWRGFKLSEKPLSDEFGVVSYFKEKGRYYVAIPYKIKAEDIKLPDKTGKATAVDVNVGHFDYTGGRMNVLPKKLDKIYGKIKHYQRQLAKKQVKNGEAACESENYLKTKAKLQACYRKASNIQNDLMQKFTTELVNNYDKIVIENLSVKGMLMSHVASKGVHRSMFGKFKQFLTYKCDWYGKELILANKLYPSTQRCAACGNVKKGDDKITLYGNKKHGTKHNEYVCYNQKCPNYNKVVDRDKNAMLSLLALTEHPELNHAL

SEQ ID NO: 4430 - protein, 432 aa, unidentified
MAEQIEEVPAELIQTRVYELHPNKTMRKVLDEACDYRRYCWNQGLALWNEMYKARQALKSSLASDSKRLTEERKVLLKEKPSPSERRVRNMLVADKKDWQYTQSARILQLAISDLGKAWNNFFDKAQPGWGKPKFRSKREARQGFKSDRSKIKDGILYLERARESSVPKDQWRGFKLSEKPLSDEFGVVSYFKEKGHYYVAIPYKIKAEDVKLPDKTGKATAVDVNVGHFDYTGGRVNVLPKKLDRIYKKIKNYQRQLAKKRVRNGEAACESKNYLKTKAKLQACYRKASNIQNDLMHKFTTELVNDYDKIVIENLSVKGMLMSHVASKGVHRSMFGKFKQILTYKCDWYGKDLILANKLYPSTQRCAACGNVKKGDDKITLYGNKKHGTKHNEYICYNKKCPNYNKVVDRDKNAMLSLLALTEHPELNHAL

SEQ ID NO: 4431 - protein, 432 aa, unidentified
MAEQIEEVPAELIQTRVYELHPNKTMRRVLDEACDYRRYCWNQGLALWNEMYKARQALKSSLASDSKRLTEEQKVLLKEKPSPSERRVRNMLVADKKDWQYAQSARILQLAISDLGKAWNNFFDKAQPGWGKPKFRSKREARQGFKSDRSKIKDGILYLERARRSSVPKDQWCGFKLSEKPLSDEFGVVSYFKEKGRYYVAIPYKIKAEDVKLPDKTGKATAVDVNVGHFDYTGGRLNVLPKKLDRTYKKIKHYQRQLAKKRVQNGEAACESKNYLKTKAKLQAYYRKASNIQNDLMHKFTTELVNDYDKIVIESLSVKSMLMSHVASKGVHRSMFGKFKQILTYKCDWYGKELILANKQYPSTQRCAACGNVKKGDDKITLYGNKKHGTKHNEYVCYNEKCPNYNKVVDRDKNSMLSLLALTEYPELNHAL

SEQ ID NO: 4432 - protein, 432 aa, unidentified
MAEQIEEVPAELIQTRVYELRPNETMRRVLDEACDYRRYCWNQGLALWNEMYKARQTLKSSLASDSKRLTEEQKVLLKEKPSPSERRVRNMLVADKKDWQYAQSARILQLAISDLGKAWNNFFDKAQPGWGKPKFRSKREARQGFKSDRSKIKEGILYLERARGSSVPKDQWRGFKLSEKPLSDEFGVVSYFKEKVRYYVAIPYKIKVEDVKQPDKTGKATAVDVNVGHFDYTGGRVNVLPKKLDRTYKKIKHYQRQLAKKQVKNGEAACESKNYLKTKAKLQAYYRKASNIQNDLMQKFTTELVKDYDKIVIENLSVKGMLMSHVASKGVHRSMFGKFKQILTYKCDWYGKDLILANKLYPSTQRCAACGNVKKGDDKITLYGDKKHGTKHNEYVCYNEKCPNYNKVVDRDKNAMLSLLALTEYPELNHAL

SEQ ID NO: 4433 - protein, 432 aa, unidentified
MAEQIEEVPAELIQTRVYELHPNKTMRKVLDEACDYRRYCWNQGLALWNEMYKARKAIKSSLASDPKKLTEEKKVLLKEKPSPSERRVRNMLVADKKDWQYTQSARILQLAISDLGKAWNNFFDKAQPGWGKPKFRSKREARQGFKSDRSKIKDGILYLERARRSSVPKDQWCGFKLSEKPLSDEFGVVSYFKEKGRYYVAIPYKIKAEDVKLPDKTGKATAVDVNVGHFDYTGGRVNVLPKRLDRIYKKIKHYQRQLAKKRVKNGEAARESINYLKTKAKLQACYRKAGNIQNDLMHKFTTELINDYDKIVIENLSVKGMLMSHVASKGVHRSMFGKFRQILTYKCDWYGKELILANKLYPSTQRCAACGNVKKGDDKITLYGNKKHGTKHNEYVCYNEKCPNYNKVVDRDKNAMLSLLALTEHPELNHAL

SEQ ID NO: 4434 - protein, 432 aa, unidentified
MAEQVKEAPAELIQTRVYELRPNKTMRKVLDEACDYGRYCWNQGLALWNEMYKARQTLKSSLSTDSKKLTEEQKVLLKDKPSPSERRVRNMLVADKKDWQYTQSARILQLAISDLGKAWNNFFDKAQPGWGKPKFRSKREARQGFKSDRSKIKDGILYLERAKESSVPKDQWRGFKLSEKPLSDEFGVVSYFKEKGRYYVAIPYKIKAEDIKLPDKTGKATAVDVNVGHFDYTGGRMNVLPKKLDKIYGKIKHYQRQLAKKQVKNGEAACESENYLKTKAKLQACYRKASNIQNDLMQKFTTELVNNYDKIVIENLSVKGMLMSHVASKGVHRSMFGKFKQFLTYKCDWYGKELILANKLYPSTQRCAACGNVKKGDDKITLYGNKKHGTKHNEYVCYNQKCPNYNKVVDRDKNAMLSLLALTEHPELNHAL

SEQ ID NO: 4435 - protein, 432 aa, unidentified
MAEQVEEVPAELIQTRVYELHPNKTMRRVLDEACDYRRYCWNQGLALWNEMYKARQTLKSSLASDSKRLTEEQKVLLKEKPSPSERRVRNMLVADKKDWQYAQSARILQLAISDLGKAWNNFFDKAQPGWGKPKFRSKREARQGFKSDRSKIKEGILYLERARGSSVPKDQWRGFKLSEKPLSDEFGVVSYFKEKGRYYVAIPYKIKVEDVKQPDKIGKATAVDVNVGHFDYTGGRVNVLPKKLDRTYKKTKHYQRQLAKKRVQNGEAACESKNYLKTKAKLQAYYRKASNIQNDLMHKFTTELVNDYDKIVIENLSVKGMLMSHVASKGVHRSMFGKFKQILTYKCDWYGKELILANKLYPSTQRCAACGNVKKGDDKITLYGNKKHGTKHNEYVCYNEKCPNYNKIVDRDKNAMLSLLALTEYPELNHAL

SEQ ID NO: 4436 - protein, 432 aa, unidentified
MTEQIEEVPAELIQTRVYELCPNKTMRKVLDEACDYRRYCWNQGLDLWNEMYKERQALKSSLASDFKKLTEEQKVLLKAKPSPSERRVRNMLVADKKDWQYTQSARILQLAISDLGKAWKNFFDKAQPGWGKPKFRSKREARQGFKSDRSKIKDGILYLEQARGSSVPKDQWRGFKLREKPLSDEFGVVSYFKEKGRYYVAIPYKIKAEDVKLPDKTGKATAVDVNVGHFDYTGGRVNVLPKKLDRIYKKIKHYQRQLAKKQVENGKAACESENYLKTKAKIQACYRKANNIQNDLMHKFTTELVNDYDKIVIENLSVKGMLMSHVASKGVHRSMFGKFKQILTYKCDWYGKELILANKLYPSTQRCAACGNVKKGDDKITLYGNKKHGTKHNEYVCYNEKCPNYNKVVDRDKNAMLSLLALTEYPELNHAL

SEQ ID NO: 4437 - protein, 432 aa, unidentified
MAEQIEEVPAELIQTRVYELHPNKTMRRVLDEACDYRRYCWNQGLALWNEMYKARQALKSSLASDSKKLTEEQKVLLKDKPSPSERRVRNMLVADKKDWQYTQSARILQLAISDLGKAWNNFFDKAQPGWGKPKFRSKREARQGFKSDRSKIKDGILYLERARRSSVPKDQWCGFKLSEKPLSDEFGVVSYFKEKGRYYVAIPYKIKAEDVKLPDKTGKATAVDVNVGHFDYTGGRVNVLPKKLDRIYKKIKHYQRQLAKKRVKNGEAACESINYLKTKAKLQACYRKASNIQNDLMHKFTTELINDYDKIVIENLSVKGMLMSHVASKGVHRSMFGKFRQILTYKCDWYGKDLILANKLYPSTQRCAACGNVKKGDDKITLYGNKKHGTKHNEYVCYNEKCPNYNKVVDRDKNAMLSLLALTEHPELNHAL

SEQ ID NO: 4438 - protein, 432 aa, unidentified
MAEQIEEVPAELIQTRVYELHPNKTMRKVLDEACDYRRYCWNQGLALWNEMYKARKAIKSSLASDPKKLTEEQKVLLKEKPSPSERRVRNMLVADKKDWQYTKSARILQLAISDLGKAWNNFFDKAQPGWGKPKFRSKREARQGFKSDRSKIKDGILYLERARRSSVPKDQWCGFKLSEKPLSDEFGVVSYFKEKGRYYVAIPYKIKAEDVKLPDKTGKATAVDVNVGHFDYTGGRVNVLPKRLDRIYKKIKHYQRQLAKKRVKNGEAACESINYLKTKAKLQACYRKAGNIQNDLMHKFTTELVNDYDKIVIENLSVKGMLMSHVASKGVHRSMFGKFRQILTYKCDWYGKELILANKLYPSTQRCAACGNVKKGDDKITLYGNKKHGTKHNEYVCYNEKCPNYNKVVDRDKNAMLSLLALTEHPELNHAL

SEQ ID NO: 4439 - protein, 405 aa, unidentified
MTAAVQAVEGGGHARYTYRVRVSSTARAALEAEWDRCRWVWNECVAKSKAVHARGRVTGEKLTCGPAQLDKMLTEARACTPWLAEGASVPQQQAVRDFAKSRAKAWKDIKARLPMRQRAGMPRWKKKRDAEPSLNYTRRGFRIRDGRLHLAGGIVLTVVWSRDLPVPPSSVRVYRDGVGHWYASFVVAARTEHLPDTGAVIGVDWGVKETATTTSDAHDLPHAQHGRRAQAKLTRYDRMMARRRPKKGQPASKGYRQAKHLRAKLHKKIVRQREDTGRKWAKGVVRDHDVVAVEDFRPRFLAKSTMARKAADAAISATKRALVEMACKHGRVVHLVHPAHTTRDCAQCGARTKHALPLSERTYACTVCGFVSPRDKNSARVMSPSYRWEVPPGPGWSHTRLVLIV

SEQ ID NO: 4440 - protein, 400 aa, unidentified
MTTPRVVGSAGHARYTYRLRVSSTAHSALLAEWDRCRWIWNECVARSKRAHRSGEKCGPARLDKMLTEARAVAPWLAEGSSVPQQQLIRDFGKSRAKALKDIKDRLPQRQRAGLPKHKKKREAGPSLNYTRRGFRLNDGRLHLAGGIVLTVVWSRDLPADPSSVRVYRDGLGHWYASFVVSAEVQPLPVTGAVIGVDWGVHETATTTSDAHDLPHAEHGRNAKAKLTRYDRMMARRKPAKGQSASKGYREAKKLRAKTYQKIARQRQDTARKWAKRIVTDHDALAVENFRPKFLAKTTMARKAADAAIGATKQALLEMGRKHGRDIRLVHPAHTTMDCASCGARTKHALPLSERTYTCITCGAVSPRDKNSARVMLVRAGLNPTGAEGVRPLGAPLQEAA

SEQ ID NO: 4441 - protein, 329 aa, unidentified
MRSHDLIPQLSGKVCYNSVKPKVEGIMLVVEAKLKNGTPEQYQKFDEAIRTAQFVRNKCVKFWMENKGTTRNDLQKLCAVLAKDSTTPWVNKLNSQARQSSADRAWQAISRFYANCRDCHRKRQKQSSNYHKQRQKVAKLHLKVFRQRKDRAIKDALALVQSNDLVVYDALKVSNLVKNHKLAQSISDASWYQFTQWVNYFAKIHKITCIAVPPQFTTIDCSVCGAKVYKTLSTRTHQCPDCQTVLDRDWNAAINILKKGLKYLGEYLNGTVGQAETDPNDWGESGLWVFNRDVEDLSRLVEPVISRSDSGRIPRQARSLTVGVCQCTQ

SEQ ID NO: 4442 - protein, 359 aa, unidentified
MRKAYKFRLYPTKGQRERIQFTLERCRLLYNRLLDERKVAYETHKTSLNYYDQANTFNERKKHIPALKQVHSQVLQDVAKRLDKAFQAFFRRVKSEEKPGYPRFKPVGRYDSFTYPQGGYSLNGSKLKLSKIGDVKIKLHRQPQGEFKTCTVIVKNGKYYVSLSCEVEPKILPKSKGTIGIDLGVKHLAITSDGEFYEHPKFLRESERKQRVKQRAVSRKKKGSHRRRKAIRELSKLHEHIANQRKDYAHKVSRKLVNRYGLIAFENLNTQGMVKNHHLAKSIVDASWNQLVQYTTYKAEEAGRRVVLVDPKNTSQLCSNCGEIVPKKLSERVHRCEHCGYVQDRDINAAQNILKRALT

SEQ ID NO: 4443 - protein, 284 aa, unidentified
MKSIRTKLKLNNKQKTLMAQHAGYSRWCYNWGLSLWNQAYKDSYKPNARKLREVFTNHTKPLYPWMKNLSSKVYQYAFINLGEAFKRFFQGLGKCPRFKKKGKSDSFPTECYANTIDNCGKPIELNGWDHKLPFIGWVKTYEPIEATTKKITISRQASDWYISCSYEFHATTTPKTTDVIGVDLGVKTLATLSDGKVFESVKSYQRFEAKLSRCQYLNRHKKVGSANWRAAQLKIARLHGKVANIRKDALHKLTTYLAKNHGSVSIEDLNVRGMLANHKLAKIS

SEQ ID NO: 4444 - protein, 357 aa, unidentified
MKAYKYRLYPTKEQSRKMHETCFLCSLVYNQFLEERREAWEIFGVSLSCYEQIKALPIKKEDDPRLKQVFSQVLQDVARQVDKTYQAFFRRVKAGETPGYPRFKAARRYDSFTYPQSGFSLKDNRLVLSKIGPVKIKLHRPMDGKVKTLTIRRQNGKWYACFSVEIDAVPLPPTGESCGIDVGLEKFVTTSDGEMFDNPRQLRQAEKKLKQHQRRVSRRKKGSNRRKKAVRELARCHEKVANQRRDLHHKVARSLVNRYDVIAIEDLQVKNMTQNHHLAKSIADAGWGNFRLILTSKAESAGRKVVEVDPKQTSQLCSRCGAEVKKKLSQRWHHCPVCGLSIDRDINAAINILKRAV

SEQ ID NO: 4445 - protein, 305 aa, unidentified
MLKTYKYRLYPTKEQSRKMHETCFLCSLVYNQFLEERREAWEIGGISIKCYDQIKSLPFKKEDNPRLKEVFSQVLQDVARRVDKTHQAFFRRVKAGETPGYPLFKPARRYDSFTYPQSGFSLEDNRLVLSKIGPVKIKLHRPMDGKVKTLTIRRQNGKWYACFSVEIDAVPLPPTGESCGIDVGLEKFATTSDGEIFDNPRQLRQAEKKLKQHQRRVSRRKKGSNRRKKAVRDLARCHEKVANQRRDLHHKVARSLVNRYDLIAIEDLQVKNMTQNHHLAKSIADAGWGNFRLILTSKAESAAVR

SEQ ID NO: 4446 - protein, 305 aa, unidentified
MLKTYKYRLYPTKEQSRKMHETCFLCSLVYNQFLEERREAWEIFGVSLSCYEQIKALPIKKEDDPRLKQVFSQVLQDVARRVDKTYQAFFRRVKAGETPGYPRFKPARRYNSFTYPQSGFNLDRNKLTLSKIGQVKIKLHRPLDGKVKTLTIRRQNGKWYACFSVEIDALPLPPTGLICGIDMGLEKFLTTSDGEMFDNPRQLRKVEKKLKQHQRRVSRRKKGSNRWKKAVRDLARCHEKVANQRRDLHHKVARSLVDRYDLIAIENLQVKNMTQNHHLAKSIADAGWGNFRLILTSKAESAAAG

SEQ ID NO: 4447 - protein, 398 aa, unidentified
MRQFAGVVRLVYNLALEQRRDWWRHYQRQTGNRLNSIAQARELTALRAAFDWIAAVHVTPQQQALRDLDKAYANVFAGRAGYPARKKGVNGAFRFQGREIEVKRLNGKWSAARLPRIGWVKFRDTRRLRGKTMNVTVSLAANGWHIAFACEIDHAVPPNDLPAVGIDRGVANTLTLSTGEHWWMPAGLAEIEPRKRRAQRVLARRKRGSRRHAKARRRVAALQAGAARIRQDWRHKASLDIARRFATVVLEDLATRNMTRSARGTVDAPATNVCQKAGLNRAILEQGWHGFETVLADKLEERGGYLCKVDPRHTSQTCSACAAVDRESRESQASFRCCQCGLRAHADHNAAINILRRNTASMIVEEGQRLSVEAITIGGASRPLGNPPLQAGKMLMKE

SEQ ID NO: 4448 - protein, 389 aa, unidentified
MLDVCKSVYNYALRGHKDWLSSRKSPINICSIISEYIIPGDTPYPNYNYQAKNLTTAKKTNPKLKSVNAQVLQQTLKQLDRAFSEMKSLGKGFPRFKKRMRSFVFPAMLKNYLGCGRFKLPQLGWIKIRQSRPYPEVMVAKQARIVKKATGYYLMVSFTSSKSVPDNLVGKTSLGIDAGIESFVATSTGKLIKAPKFLSGQLRKLKLASDPAPPPGARERASLLQRRLKHKNKGSSNWSKLQNRIARLDEKISNTRRDWHFNIAHQLCDLADNIFVEYVNFNSWSKGIVRKQSLDSGIGQFINEILPYVCWKRGKYYAKVDKNYTSQEYPLCGHRQKKKLSDRKHNCSNCSYQINRDVAAAKIIRNRGLIAVGHTAKEKRTACAEVPSA

SEQ ID NO: 4449 - protein, 333 aa, unidentified
MITLTYQYKLKTTKQQEAEINQILDVCKTVYNYALRERKDWLSSRKSLINSCSIISEYIIPADAPYPNYNCQAKSLTVAKKTNPRLKSVNAQVLQQTLKTLDRAFVDMKSLGRGFPRFKKRMRSFVFPAMLKNCLGNNRFKLPQLGWIKLRQSRPYPENMVAKQARIVKKASGYYLMVSFQSSELVPDNPVGKKSLGIDAGIENFVATSTGKLFTSPKFLLGQLRELKLLQRRLKNKTKGSNNWLKLQNKIASLHEIIANTRRDWHFKLAHQLCDLADNTFVEDINFTSWSKGIVRKQSLDSGIGKFINEILPYVCWKRGKYYAKVDKNYTSQ

SEQ ID NO: 4450 - protein, 414 aa, unidentified
MLNRAFRYKLKVDAAQDSVFRQYAGVVRLIYNVALEQRSVFWRQHLARTGKAISVTTQCRELTALRAEYDWIRALHVTPQQQALRDLDKALGNFFAGRADYPKPRSRRENNAFRFQGREVDVETLSRKWARVRLPKIGWVKFRLTRPLRGTIKNVTVALDPLGWHVSFACAIEHEAAESNLPDVGMDRGVAITAVLSSGDRLRIPGSLALIEKRRRQAQKIVARRKRGSNRRAKALRRVAKLSAKSARIRRHWQHRVSRNLASRFGTVVVEDLKVRNMTASAAGTVAEPGRSVRQKSGLNRSILEQGWHSLTTLLEYKLSEHGGHLVAVDPRYTSQTCSSCGVVDPRSRKSQARFHCVHCGFRAHADYNAAVNVLRRNTAPMLVEGCGCAPVEARTGRSRMVPENPPPSGGGRC

SEQ ID NO: 4451 - protein, 359 aa, unidentified
MRKAYKYRLYLTKAQEENIQFTLERCRLLYNRLLDERRFAYETDKTTLNYYDQANTLNERKKYIPALKQVHSQVLQDVAKRLDKAFQAFFRRVKAGETPGYPRFKSAGRYDSFTYPQGGYAINGHQLTLSKIGEVKIKLHRLPQGKIKTCTVMVKNGKYYASLSCDVEPNTLPESNATVGIDLGVKHLAITSDGDFYEHPKFLRESEWKLHRKQRSVSRKKKGSSRRRKAIRELARLHEHIANQRRDYAHKVSRKLVNGYGLIAFEHLNVQGMVKNHHLAKSIVDASWHQLVQYTTYKAEEAGRRVVLVDPKNTSQLCSNCGEIVPKKLSERVHRCNYCGYVQDRDVNAAQNILKRALA

SEQ ID NO: 4452 - protein, 359 aa, unidentified
MRKAYKYRLYPTKEQAEKIQFTLERCRLLYNRLLDERRFAYETDKTTLNYYDQANTLNERKKYIPALKQVHSQVLQDVAKRLDKAFQAFFRRVKAGETPGYPRFKSAGRYESFTYPQGGYAINGHQLALSKIGEVKIKLHRLPQGKIKTCTVIVKNGKYYASLSCDVEPNTLPESNATVGIDLGVKHLAITSDGDFYEHPKFLRESEWKLHRKQRSVSRKKKGSSRRRKAIRELARLHEHIANQRRDYAHKVSRKLVRGYGLIAFENLNVQGMVKNHHLAKSIVDASWNQLVQYTTYKAEEAGRRVVLVDPKNTSQLCSNCGEIVPKKLSERVHRCDHCGYVQDRDINAAQNILKRALA

SEQ ID NO: 4453 - protein, 402 aa, unidentified
MGVGEGSRVRYTYRLRVSLTARVALEAEWARCRWVWNECVAKSKQVQERGRRTGVKETCGPAGLDRMLTEARRVMPWLREGSSVPQQQTIRDFGKARAKALKDIADRLPVNRRAGMPKLKKKRDTSLSLNYTTRGFQLRDGRLHLAKGIALTVVWSRELPSRPSSVRVYRDSLGHWYASFVVATSAEVLPATGAVIGIDWGVAETATTTSDAHDLPHAEFGSRAAQRLARYQRQMARRKPKHGQPSSRGYKESQRQAAKAHKKVARQRQDTARKWAKRVVTDHDVIAVEDFKPTFLTKTTMARKAADAAIGATKAALVAMARKHGRDLRLINPAHTTVDCGRCGARAKHRLPLSERIYTCTACGAVSPRDKNSAYVMLVRAGFDPAGAEGVRPVGALLPQAA

SEQ ID NO: 4454 - protein, 353 aa, unidentified
MKTLKLRIKDKHCKVLDQLASEVNFVWNYVNDLGFRHLKRKGEFLSAFDIAKYTKGTSKECNLHSQTIQAVTEELVTRRKQFKKAKLKWRVSNKKSARRSLGWVPFKKLAIKYATGYVQYGKHQFKLWDSYGLSKYTLKTGSFVEDSRGRWYVCLVVESPKQDKSTATKAIGIDLGLKDIATCSDGTVISNPKFYRKYEQTLGIAQRARNKKRVRALHAKIANSRKDHLHKASTKLVNENALIIVGDLSAKKLVKTKMAKSVLDTGFSALKTMLKYKCENAGVLFEEVQEAYTTQICSCCGEITSSSPKGRTDLGIREWECMSCGTAHDRDINSALNILALGHKRLAVGITLF

SEQ ID NO: 4455 - protein, 432 aa, unidentified
MAEQIEEVPAELIQTRVYELHPNKTMRRVLDEACDYRRYCWNQGLALWNEMYKARQALKSSLASDSKRLTEEQKVLLKEKPSPSERRVRNMLVTDKKDWQYTQSARILQLAISDLGKAWNNFFDKAQPGWGKPKFRSKREARQGFKSDRSKIKDGILYLERAKESSVPKDQWRGFKLSEEPLSDEFGVVSYFKEKGRYYVAIPYKIKAEDVKLPDKTGKATAVDVNVGHFDYTGGRVNVLPKKLDRIYKKIKHYQRQLAKKQVKNGEAACESENYLKTKAKLQACYRKASNIQNDLMHKFTTELVNDYDKIVIENLSVKGMLMSHVASKGVHRSMFGKFKQILTYKCDWYGKELILANKLYPSTQRCAACGNVKKGDDKITLYGNKKHGTKHNEYVCYNEKCPNYNKVVDRDKNAMLSLLALTEHPELNHAL

SEQ ID NO: 4456 - protein, 386 aa, unidentified
MTIKTQVVKLKVNKTMQKHLDALCDYRRYCWNKGLETWQLMYEAHTLNKKDNPSPNERRVRDELVANKADWQYDLSARCLQLAIKDLANAWKNFFDKSQPDWGIPSFKSKKAPRQGFKTDRAKIVNGKLRLDRPRSISKESWFDLKSYEALKMDEVKVVSVFKEKDNYYAALPYEEEIELKAKTQQKTAVDVNVGHFNYTEGQINILPAKLQKLYKRIKHYQRMLARKREVNGKLATKSNNYFAVRTKLQRDYRKAANIQNDLLQKFTTKLVNNYDQIVIEDLAVKEMMMTHVASKGMQRSLFSKFRRILTYKCDWYGKELILANKTYPSTQRCAACGYGKKGEEKITLQGNKKHGTKHNEYVCYECGYKNDRDENAVLNLLALAK

SEQ ID NO: 4457 - protein, 385 aa, unidentified
MIKAQVVKLKVNKTMQKHLNALCDYRRYCWNKGLETWQLMYEAHTLNKKDNPRPNERRVRNELVANKADWQYDLSARCLQLAIKDLANAWKNFFDKAQPDWGMPSFKSKKAPRQGFKTDRAKIVNGKLRLDRPRSISKESWFDLKSYEVLKMDEVKVVSIFKEKGSYYAALPYEEDMPAKAKTHQKTAIDVNVGHFNYTEGQINVLPAKLQKLYKRIKHYQRMLARKREVNGKLATKSNNYFAVRTKLQRDYRKVANIQNDLLQKFTTKLIDNYDQIVIEDLAVKEMMMTHVASKGMQRSLFSKFRQILTYKCDWYGKELILADKTYPSTQRCAKCGYVKKGEEKITLQGNKKHGTKHNEYVCYECGYSNDRDENAVLNLLALVK

SEQ ID NO: 4458 - protein, 385 aa, unidentified
MIKAQVVKLKVNKTMQKHLNALCDYRRYCWNKGLETWQLMYEAHTLNKKDNPRPNERRVRNELVANKADWQYDLSARCLQLAIKDLANAWKNFFDKAQPDWGMPSFKSKKAPRQGFKTDRAKIVNGKLRLDRPRSISKESWFDLKSYEALKMDEVKVVSIFKEKGSYYAALPYEEDMPAKAKTHQKTAIDVNVGHFNYTEGQINVLPAKLQKLYKRIKHYQRMLARKREVNGKLATKSNNYFAVRTKLQRDYRKVANIQNDLLQKFTTKLIDNYDQIVIEDLAVKEMMMTHVASKGMQRSLFSKFRQILTYKCDWYGKELILADKTYPSTQRCAKCGYVKKGEEKITLQGNKKHGTKHNEYVCYECGYSNDRDENAVLNLLALVK

SEQ ID NO: 4459 - protein, 292 aa, unidentified
MWQFSGVVRLVYNLALEQRRDWWRQYTANTGKSLTYVAQARELTELRQSFDWIAVVSQTSQQQALRDLDRAYANFFAGRAGYPTPRRRGVNDAFRFLGRECRIRRLNRNWGMIHLPKIGEVRFRWTRDIAGTVKNVTVSRAALGWHVSISCEVEIDKTKKLNAEAVGVDRGVVHTLAYSDGEFADLPLERLRVLDRRARKQAQALARCRHGSKRRKKAKARLARTRAKAARIRKHWIHERTAHLSRRFGTVVIEDLNPLATQSPSFRKGSRSLWLSLILDILLHDFQRRPAA

SEQ ID NO: 4460 - protein, 386 aa, unidentified
MRQFSGVVRLVYNLALEQRRDWWRQYAVRTGKSLTYVAQARELTELRRSFDWIAAVSQTSQQQALRDLDRAYANFFAGRSGYPTPRRRGVNDGFRFHGRECRIRRLNRNWGAIHLPKIGEVRFRWTRDVLGDVKNVTVSRDPLGWHVSIACEVESEAPEKRAAEAVGIDRGVAHTLAFSDGTFADLPLERLRVLDRRARKQARSLARCRRGSKRREKAKARLARTKAKTARVRKHWVHERSAGLARRYGTVVTEDLKVANMTASARGTVEAPGTHVRQKAGLNRSILEQGWYQFETCLRYKLEAAGGVLIKVPAAYTSQTCSECGSISKTHRKSQAVFLCSDCGHSAHADTNAARNILRAGTRPSGRAPVAGPTTRESRQNALAAA

SEQ ID NO: 4461 - protein, 419 aa, unidentified
MNYSYRYRLTPTEDQRETLDYHRDTCRQLYNHALYRFNQIPEDEGTVKQRVRTIRDELPDLKDWWDALADIYSKVLQPTVMRIAKNINALGKLKEQGYKVGELRWKSPREFRSFTYNQSGFELDKKGGQTVLSLSKLADIPIEFHRPLPDDATVKEVTLKKEKTGEWFAIFGIERDTEPPAKPSLEEIDAEEVVGIDVGIRKYAHDTDGTAVESLELSEDRNRLEREQRKLSRKAYESTNWENQRQRVAEYHLDIKRKRRDLLHKLSNYYAREYDLVAVEDLDVKGMLESPRNSRNTASAAWNTFTDMLEYKCEREGTHFVEVDPDGTTKECAQCGVETEKPLWVREHSCPACGFEADRDANAAWNILSRGLTKLGVGHSEGTPVETALPAGTTPVPAKRVLEAGSPTLSERVSASRVG

SEQ ID NO: 4462 - protein, 414 aa, unidentified
MYYAYKYRLKPSDAHREELDRHRDICRQLYNHALYRFDQIPEDAGTLNQRVRSIRDELPSLKEWWDGLSGVYSTVLQTAVMRIEQNVKSLGGLKEDGHGVGQLTWKPPREFRSFTYSQSGFKLDKKGGQTVLSLSKLADIPIRLHRAIPDDAKLKQVSVKKEPTGEWFATFGVQMDREPPEPPENPEKCVGIDVGILKYAHDTDGTAVGSLDLSDDRERLEREQRKLSRKQHESNNWERQRRRVAECHADLRRKRRDFLHKLSNYYAREYDLVAVEDLNVKGMMESPSNSRNTASAAWRTFLSLLEYKCKREGAHFVAVNPRGTTKECASCGVSTDKPLWVREHSCPACGFEADRDANAAWNIRSRGLKDVGVGYSESTPVETALPVDTVVSAKRVIEAGSPTLTERTASAVSE

SEQ ID NO: 4463 - protein, 382 aa, unidentified
MFRQFSGVCRLVYNIALEQRRDWYRQFEANTGSRLNYISQARELTTLRAEYDWIAAVSQTCQQQALRDLDRAKQSFFKGIARYPTARKKGLNDSFRFQGREVEVRPLGTKWSAVRLPKIGWVKFRNTRAMRGHIKNATVRLAPDGWHISFACEIEHVAPTNTNPAVVIDRGIANALALSDGTMIEAPARFEKLDRQRRKAQRILARRQRGSRNDARQRRRVAALAAKAGRIRKDFLHRISTSIARHYGAVVLEDLKIRNMTASAKGTVEEPGRMVRQKAGLNRSILEQGWAMFATLLDYKLTERGGYLATVNPAYTAQTRSACGAIDTRSRKNQAVFSCLTCGFDIHADTNAAINILRRWNAPLLPVEALVGGPAKQEPTAA

SEQ ID NO: 4464 - protein, 382 aa, unidentified
MFGQYAGVCRLVYNLGLEQRRNWWRLFRANTGNAISYPSQARELTALRAEFDWIAAVSIICQQQALRDLDKAFGNFFAGRADYPTPRKRGLNDAFRFSGRDCQWHKLNAKWATVKLPKIGEVKFRLTRAIPGTIKNVTVTGDALGWHVVFSTEVEHTAPANFGPAVGIDRGVVRTLALSDGTFRDMPKERLNVLDRRARKQARKLAKCKRGSNRRNAARKTLARTKAKIARVRLHWNHERTTEIAATHGVVALEALKTKSMTASAAGKVEEPGRKVRQKAGLNRAILNNAWHQFEALLSYKIAERGGELRKVNPAYTSQCCAECGTIDKASRESQANFRCGHCGHTANADTNAARSILRAGTQPAPRIAVGRPLKRELKRVA

SEQ ID NO: 4465 - protein, 414 aa, unidentified
MYYAYKYRLKPSNVHREELDRHRDICRQLYNHALYRFNQIPEDAGTLNQRVRSIRDEIPSLKDWWDGLSDVYSTVLQTAVMRIEQNVKSLGGLKENGYGVGHLTWKPPREFRSFTYSQSGFKLNKKGGQTVLSLSKLADIPLRLHRPIPDNATLKQVTVKKEPTGEWFATFGVELDRESPELPENPEQCVGIDVGILTYAHDTDGTAVGSLDLSDECERLEREQRKLSRKQHGSKNWEKQRRKVAECHADLRRKRRDFLHKLSAYYAREYDLVAVEDLNVTGMMESPSNSRNTASAAWRTFLSLLEYKCEREGAYFVAVNPRGTTKECASCGVSTQKPLWVREHSCPACGFEADRDANAAWNIRSRGLEDVGVGHSEATPVETALPADTPVSAKRVVETGSPTLTERTAQAVSE

SEQ ID NO: 4466 - protein, 386 aa, unidentified
MINRGFRFRLYPTEEQAVRLSQFAGATRFVYNLALEQRSTFWRPGRRFNYVTQNREVTQLRAEVPWLAEVSAASLTNALRDLDQAFAAFFAHRSGYPTMRTRERNSSFRVKGEEIAAKKLNRRWAAVRIPKIGWVRYRDTRPLRGRTLNATIGRDALGWHVCFACEIEHEAQPSALPSVGIDRGVANTIALSTGELLSTPATKTLERRKKRAQRILARRQRGSARYRKQRQRLSRITSKIARVRADWRHKATTGIADRFGLAAIEDLNTKGMTAKGRGKRGLNRSILEHGWHRFETTLAYKLEERGGTLVKINPAYTSQECSACGVTDKASRESQSRYACRHCGTTIHADTNAAINILRRSSPAMLVEGAGYGPAEARTVNHALVA

SEQ ID NO: 4467 - protein, 413 aa, unidentified
MYYAYKYRLKLSDAHREELDRHRDICRQLYNHTLYRLNEYQDEYGELPSMTTLRSELPDLKKWWDDLSDVYSKVLQTVVERLFDNLKALSKLKENGYGVGHLKWKPPREFRSFTYSQSGFKLDKKGGQTVLSLSKLAEIPIRLHRAIPDDAKLKQVTVKKEPTGEWFATFGVQMDREPPEPPENPEKCVGIDVGILKYAHDTDGTAVGSLDLSNEHERLEREQRKLSRKQHGSNNWEKQRRRVAECHANLRRKRRDFLHKLSAYYAREYDLVAVEDLNVKGMMESPSNSRNTASAAWRTFLSLLEYKCEREGTHFVAVNPRGTTKECASCGVSTEKPLWVREHSCPACGFEADRDANAAWDILSRGLEDVGVGYSESTPVESALPVDASVSAKRVVETGSPTLKDRTASPVSE

SEQ ID NO: 4468 - protein, 417 aa, unidentified
MHYAYRYRLHPTEAQRETLDYHRDTCRQLYNHALNEFKQIPKSAGALNQRVRQVRDQLPDLKDWWNALNDIYSTVSQAAVMRIEDSIKALSALKKNGHDVGSLNWKAPDEFRSFKYVQSGFEFDKKNGQTVLSLSKLADIPITYHRKIPDDVTVKEVVIKKERTGEWYASFAVEGKETPAKPKDPDRCVGIDVGILKYAHDTDGRAVGSLGLRNEQERLRREQRSLSRKQTGSNNWEKQRLKVAECHQQVRRKRHDVLHKLSNYYATEYDLVTVEELNVKSMLESAGNSQNTASASWDTFTTMLEYKCKREGTHFAEVEPAGTTKECASCGVESDKPLWVREHSCPACGFEMDRDANAAINILSRGFEELGLGQSEGTPVETALPMFTSSGSSDVVDVKRVVETGSPTLNETVPSAE

SEQ ID NO: 4469 - protein, 369 aa, unidentified
MIKTYKTEIQPTNDQKLIINQTIGTCRWVYNKYIAVNQYNYHHGLNHMSGYDFSKWLNHLYLPSNPDKYWVKESASKAIKQSIMNAHQAYQYAFKKQKAFPKFKKKSGIGSYYLIGTIHVERHRIQLPKLGWVRLKEKGYIPSNNVKSVTMVKQFDRYYVAALVDESPKPMFKSKQMEGLGLDLGLKDTLFSPNGVEIKSLSKNQKLIKLHKSLKRQQRKLSRKTKTSNNWFKQLLKVQRLYRRISHIKKDIKRKSILSIVQQNPQFITIENLNIKGLMKNKHLSNAFQQVGLGYVVEWLKHKCHQYGIELRQVDRFYPSSQLCSQCNQRQPMPLNKRVYRCNHCGLEMDRDINASINLKQAKDYTVIV

SEQ ID NO: 4470 - protein, 302 aa, unidentified
MAEQIEEVPAELIQTRVYELHPNKTMRRVLDEACNYRRYCWNQGFALWNEMYKARQTLKSSLSTDSKKLTEEQKVLLKDKPSPSERRVRNMLVADKKDWQYAQSARILQLAISDLGKAWNNFFDKAQPGWGKPKFRSKREARQGFKSDQSKIKDGILYLERAKESSVPKDQWRGFKLSEKPLSDEFSVVSYFKEKGRYYVAIPYKIKAKDIKLPDKTGKATAVDVNVGHFDYTGGRINVLPKKLDKIYGKIKHYQRQLAKKASQKWRSCLRKRELLEDESQASSMLSQGKQYPKRLDAEVYD

SEQ ID NO: 4471 - protein, 365 aa, unidentified
MRAYKTEIKPNKAQIELINQTIGVTRYVYNLFITKNQNRYKRNLSFMSGYDFSKWVNNRHSKEKQWIKNVPSKAVKQTIMNAEDSYRKFFKGHSSYPKHKKKSLNGAFYLIGTIKVERHRIFLPKLKWIQLKEFGYIPKSNIKSATISRKGSHYFVSVLADEPFTVNVRNQKSEPIGLDLGLKETVYSSNGEKLMSLYRNKQLIKLNKSLKRQQRKLSRKQKGSNNRYKQLLKINRLYQRISNIKTDMKRKLISTIIKVNPRYITIENLNIKSMMKNRRLSNALQQTGLGYVVEWLKHKSKQHDIELRQVDRFYPSSQLCSCCKHRQKMPLNKRTFYCENCGNEIDRDWNASLNLVKAEDYVVLT

SEQ ID NO: 4472 - protein, 434 aa, unidentified
MYYAYKYRLNPSDAHREELNRHRDICRQLYNHALYRFDQIPEGSGTLNQRVRSIRDEVPSLKDWWEALSDVYSTVLQTAVMRIEQNVKGLSKLKENGYGVGQLTWKPPREFRSFTYSQSGFKLDKKGGQTVLSLSKLADIPIRLHRATPDNAKLKQITLKKEPTGEWFATFGVEVDREPPEKSDKLTDVVGIDVGILKYAHDTDGTAVGSLDLSNERERLEREQRTLSRKQHGSNNYEKQRRRVAECYAGLKRKRRDFLHKLSAYYAREYDLVAVEDLNVKGMMESPSNSRNTASAGWQTFLSLLEYKCEREGTHFVEVDPRGTTKECASCGVSTEKPLWVREHSCPACGFEADRDANAAWNILSRGLGDVGVGYSEPTPVNRLGVKPRGFPWISRTHPCDHRSDSLERSGGSRSADSHSPMSAVAVSEQSATC

SEQ ID NO: 4473 - protein, 402 aa, unidentified
MGVGEGSRVRYTYRLRVSSTARVALEAEWARCRWVWNECVAKSKQVQERGRRTGVKETCGPAGLDRMLTEARRVMPWLREGSSVPQQQMIRDFGKARAKALKDIADRLPVNRRAGMPKLKKKRDTSLSLNYTTRGFQLRDGRLHLAKGIALTVVWSRELPSRPSSVRVYRDSLGHWYASFVVATSAEVLPATGAVIGIDWGVAETATTTSDAHDLPHAEFGSRAAQRLARYQRQMARRKPKHGQPSSRGYKESQRQAAKAHKKVARQRQDTGRKWAKRVVTDHDVIAVEDFKPTFLTKTTMARKAADAAIGATKAALVAMARKHGRDLRLINPAHTTMDCAQCGTRAKHRLPLSERTYTCTACGASSPRDRNSARVMLVRAGLNPAGAEGVRPVGALLPQAA

SEQ ID NO: 4474 - protein, 413 aa, unidentified
MYYAYKYRLKPSDAHREELDRHRDICRQLYNHTLYRLNEYQDEHGELPSMTTLRSELPDLKKWWDGLSDVYSKVLQTVVERLFDNLKGLSALKENGYGVGQLKWKPPRGFRSFTYSQSGFKLDKKGGQTVLSLSKLADIPIRLHRAIPDDATLKQVTVKKEPTGEWFATFGVEMDREPPEPPENPEKCVGIDVGILKYAHDTDGTAVGSLDLSDERDRLEREQRKLSRKQHGSNNYEKQRRQVAECHADLRRKRRDFLHKLSNYYALEYDLVAVEALNVKGMIESPSNSRNTASAAWRTFLSLLEYKCEREGTHFVAVNPRGMTKECASCGVSTRKPLWVREHSCPACGFEADRDANAAWKILSRGLEDVGVGHSERTPVETALPVDTPVSAKRVVEAGSPTLKERTALAVSE

SEQ ID NO: 4475 - protein, 385 aa, unidentified
MIKTQVVKLKVNKTIQKHLDALCDCRRYCWNKGLETWQLMYEAHTLNKKDNPSPNERRVRDELVANKADWQYDLSARCLQLAIKDLANAWKNFFDKAQPDWGIPSFKSKKAPRQGFKTDRAKIVNGKLRLDRPRSISKADWFDLKSYEALKMNEVKVISIFKEKDSYYAALPYEEEISSKAKNHQKTAVDVNVGHFNYTDGKINVLPAKLQKLYKRIKHYQRMLARKREVNGKLATKSNNYFAVRTKLQRDYRKVANIQNDLLQQFTTKLVDNYDQIVIEDLAVKQMMMTHVASKGMQRSLFSRFRQILTYKCNWYGKELILADKTYPSTQRCAACGYVKKGEEKITLQGNKKHGTKHNEYICYECGYKNDRDKNAVLNLLALAR

SEQ ID NO: 4476 - protein, 363 aa, unidentified
MLIAFKYRLYPTKQQKVAIHFTLERCRLLYNRLLAERVIAYKAEGKSLNYYDQASTFNERKQYVPALKQVYSQVLQDVAKRLDKAFQAFFRRVKSGEAPGFPRFKPEQRYDSFTYPQGGHTINGNKLRLSKIGDVKIKLHRLPQGKVKTCTITAKNGKYYACFSCVVNGETLPASTDQVGIDLGLKHLAITSAGETFEAPKRLRYKERKLKQLQRCVSRKQRGSNRRKKSIRILAKLHEKVANGRKNHAHKVSRQLVNRYGLIAFENLNVQGMLKNHHLAKSIADAGWNQLVQYTLYKAESAGRVVVRVDPRNTSQMCSNCGEFVKKTLSVRVHRCSCGYVEDRDVNAARNILQRALEEWEAS

SEQ ID NO: 4477 - protein, 413 aa, unidentified
MYYAYKYRLEPSDAQREELDRHRDVCRQLYNYALYRFDQIPESAGTLNQRVRSIRDELPSLKDWWNDLSDVYSTVLQTAVMRIEQNLKSLGGLKQNGYGVGQLTWKPPREFRSFTYSQSGFKLDKKGGQTVLSLSKLADIPIRLHRAIPDDAKLKQVTLKMEPTGEWFATFGVEVDREPPEKPANPKNVVGIDVGILKYAHDTDGHAIESVDLSDERDRLEREQRKLSRKDHDSNNWEKQRRRVAECHADLKRKRRDFLHKLSNYYAREYDLVAVEDLDAKGLVELDGNSRNRAGAAWGTFLRMLEYKCERDGAHFVAVDPAETTKECAACGVSTDKPLWVREHSCPSCGFTADRDWNAAWNILSRGITQVGAGRSESPPVETALPTGTHSVPAKRVVEAGSPTLKREPSGER

SEQ ID NO: 4478 - protein, 414 aa, unidentified
MYYAYKYRLKPSDAQREELDRHRDICRQLYNHARYRFNEIPESAGTLNQRVRSIRDELPALKEWWDDLSDVYSTVLQTTVMRIEQNIKSLGELKKNGYNVGRLKWKPPREFRSFTYSQSGFKLDKKGGQTVLSLSKLADIPIRLHRAIPDDAKLKQVTVKKEPTGEWFATFGVQMDREPPEPPENPERVVGIDVGILKYAHDTDGTAVGPLDLSDERERLEREQRTLSRKEQGSNNYEKQRRRVAECHADLRRKRRDFLHKLSAYYAREYDLVAVEDLNVKGIMESPSNSRNTASAAWRTFLSLLEYKCERGGTHFVAVDPRGTTKECASCGVSTEKPLWVREHSCPACGFEADRDANAAWNILSRGLEDVGVGYSESTPVETALPGDTPVSAKRVVEAGSPTLKERTASAVSE

SEQ ID NO: 4479 - protein, 419 aa, unidentified
MHYAYRYRLKPTAQQHELLDYHRDTCRQLYNHALGEFNEISESAGTLNQRVRQVRDQLTDLKEWWDELNDLYSTVAQAAVMRIEDNIKALSELKEKGYNVGSLNWKAPREFRSFTYVQSGFEFDKKNGQAVLSLSKLADIPIECHRDIPDNETVKEVTLKKEPTGEWYASFGVSDKKEPAKPPLEEIDADEMVGIDVGILKYAHDTDGTAVGSPDLSDERDRLEREQRNLSRKEYGSNNWEKQRRRVAECHQQLKRKRRDFLHKLSAYYALEYDLVAVESLVVKGMLESPRNRRNTASAAWDTFTNLLEYKCKREGTHFVEVDPEDTTKECASCGVKTDKPLWVREHSCPACGFEADRDANAAWNILFRGLTELGVGYSEGTPVETALPVDTAVVSAKRVVEAGSPCLTEPPMAASRKG

SEQ ID NO: 4480 - protein, 421 aa, unidentified
MNYNYRYRLKPTERQRETLDYHRDTCRQLYNHVLYRFNQIPESDGTVKQRVRQIRDELPALKDWWDALTDVYSKVLQPTVMRIAKNVKALGKLKEQGYKVGELRWKSPREFRSFTYNQSGFELDKKGGQTVLSLSKLADIPIELHRPLSDDATVKEVTLKKEKTGEWFAIFGIEMDTEPPAKPPLEEIDAEEVVGIDVGILRYTHDTDGTAVESLDLSEERGWLEREQRKLSRKEYQSNNWEKQRRRVAECHLEIKRKRRDFLHKLSNYYAREYKLVAVEDLDVKGMLESPRNSRNTASAAWNTFTDMLETKCGRQGTHFVKVGPEGTTKECAQCGVETDKPLWVREHSCPACGFEADRDANAAWNILSRGLTDLGVGHSEGTPVETALPVDTPVSAKRVVEAGSPYLKERAATPRVSRQG

SEQ ID NO: 4481 - protein, 414 aa, unidentified
MYYAYKYRLKPSDAHREELDRHRDICRQLYNHTLYRLNEYQDEHAELPSMTTLRSELPTLKEWWDDLSDVYSKVLQTVVERLFDNLNSLSTLKENGYGVGQLKWKPPREFRSFTYNQSGFKLDKKGGQTVLSLSKLADIPMRLHRNIPDDANLKQVTVKKEPTGEWFATFGVQIDREPSEPTENPEKCVGIDVGILKYAHDTDGTAVESLDLSDERERLEREQRKLSRKQHGSNNYEKQRRRVAECHADLRRKRRDFLHKLSNYYAREYDLVAVEDLNVKGMMESPSNSRNTASAAWRTFLSLLEYKCKREGTYFVAVDPRGTTKECASCGVLTEKPLWVCEHSCPACGFEADRDANAAWNILSRGLEDIGVGHSESTPVETALPTDTDSVSVKRVVETGSPTLKERTASAVSE

SEQ ID NO: 4482 - protein, 414 aa, unidentified
MYYAYKYRLKPSDTHREELDRHRDICRQLYNHTLYRLNEYQDEHGELPSMTTLRSELPDLKTWWDDLSDVYSKVLQTVVERLFDNLKGLSKLKENGYGVGQLKWKPPREFRSFTYSQSGFKLDKKGGQTVLSLSKLADIPIRLHRAIPDDAKLKQVTVKKEPTGEWFATFGVKMDREPPEPPENPEKCVGIDVGILKYAHDTDGTAVGSLDLSGERNRLEREQRKLSRKEHGSNNYEKQRRRVAECHADLRRKRRDFLHKLSAYYAREYDLVAVEDLNVKGMMESPSNSRNTASAAWRTFLRMLEYKCEREGTHFVAVNPRGTTKECASCGVSTDKPLWVREHSCPACGFEADRDANAAWNILSRGLDEVGVGHSESTPVETALPADTAVVSAKRVVEAGSPTLKERTASAMSE

SEQ ID NO: 4483 - protein, 419 aa, unidentified
MHYTYRFRLKPTAQQRELLDYHRDTCRQLYNHALREFNKIPDSTGTLNQRVRQVRDQLTDLKSWWDELNDLYSTVAQAAVMRIEDSIKALSELKEQGYNVGSLNWKAPGEFRSFTYVQSGFEFDKKNGQTVLSLSKLADIPIECHQDIPDDETVKEVTLKKEPTGEWYASFAVDDKAEPPKPSLEDVDNDDMVGIDVGILKYAHDTDGTAVGSFDLSEERDRLEREQRTLSRKEHRSNNWQKQRQRVAECHQQIKRKRRDFLHKLSAYYAQEYDLVAVEDLDVKVMLESPRNSRNTASAAWNTFTDLLEYKCKREGTHFVEVEPAGTTKECASCGVETDKPLWVREHSCPACGFEADRDANAAWNILSRGLSQLGVGHSEGMPVKTALPTGTAVVPAKRVVEPGSPCLKEPPKAASRQG

SEQ ID NO: 4484 - protein, 353 aa, unidentified
MKTLKLRIKDKHRKVLDQLASEVNFVWNYVNDLGFRHLKRKGEFLSAFDIAKYTKGTSKECNLHSQTIQAVTEELVTRRKQFKKAKLKWRVSNKKSARRSLGWVPFKKVAIKYANGYVQYGKHQFKLWDSYGLSKYTLKTGSFVEDSRGRWYVCLVVESPKQDKSTATKAIGIDLGLKDIATCSDGTVISNPKFYRKYEQKLGIAQRARNKKRVRALHAKIANSRKDHLHKASTKLVNENALIIVGDLSAKKLVKTKMAKSVLDTGFSALKTMLKYKCENAGVLFEEVQEAYTTQICSCCGEITSSSPKGKTDLGIREWECMSCGTAHDRDINSALNILALGHKRLAVGITLF

SEQ ID NO: 4485 - protein, 353 aa, unidentified
MKTLKLRIKDKHCKVLDQLASEVNFVWNYVNDLGFRHLKRKGEFLSAFDIAKYTKGTSKECNLHSQTIQAVTEELVTRRKQFKKAKLKWRVSNKKSARRSLGWVPFKKVAIKYANGYVQYGKHQFKLWDSYGLSKYTLKTGSFVEDSRGRWYVCLVVESPKQDKSTATKAIGIDLGLKDIATCSDGTVISNPKFYRKYEQKLGIAQRARNKKRVRALHAKIANSRKDHLHKASTKLVNENALIIVGDLSAKKLVKTKMAKSVLDTGFSALKTMLKYKCENAGVLFEEVQEAYTTQICSCCGEITSSSPKGKTDLGIREWECMSCGTAHDRDINSALNILALGHKRLAVGIILF

SEQ ID NO: 4486 - protein, 353 aa, unidentified
MKTLKLRIKDKHCKVLDQLASEVNFVWNYVNDLGFRHLKRKGEFLSAFDIAKYTKGTSKECNLHSQTIQAVTEELVTRRKQFKKAKLKWRVSNKKSARRSLGWVPFKKVAIKYANGYVQYGKHQFKLWDSYGLSKYTLKTGSFVEDSRGRWYVCLVVESPKQDKSTATKAIGIDLGLKDIATCSDGTVISNPKFYRKYEQKLGIAQRARNKKRVRALHAKIANSRKDHLHKASTKLVNENALIIVGDLSAKKLVKTKMAKSVLDTGSSALKTMLKYKCENAGVLFEEVQEAYTTQICSCCGEITSSSPKGKTDLGIREWECMSCGTAHDRDINSALSILALGHKRLAVGITLV

SEQ ID NO: 4487 - protein, 353 aa, unidentified
MKTLKLRIKDKHCKVLDQLASEVNFVWNYVNDLGFRHLKRKGEFLSAFDIAKYTKGTSKECNLHSQTIQAVTEELVTRRKQFKKAKLKWRVSNKKSARRSLGWVPFKKVAIKYANGYVQYGKHQFKLWDSYGLSKYTLKTGSFVEDSRGRWYVCLVVESPKQDKSTATKAIGIDLGLKDIATCSDGTVISNPKFYRKYEQKLGIAQRARNKKRVRALHAKIANSRKDHLHKASTKLVNENALIIVGDLSAKKLVKTKMAKSVLDTGSSALKTMLKYKCENAGVLFEEVQEAYTTQICSCCGEITSSSPKGKTDLGIREWECMSCGTAHDRDINSALSILALGHKRLAVGITLF

SEQ ID NO: 4488 - protein, 353 aa, unidentified
MKTLKLRIKDKHCKVLDQLASEVNFVWNYVNDLGFRHLKRKGEFLSAFDIAKYTKGTSKECNLHSQTIQAVTEELVTRRKQFKKAKLKWRVSNKKSARRSLGWVPFKKVAIKYANGYVQYGKHQFKLWDSYGLSKYTLKTGSFVEDSRGRWYVCLVVESPKQDKSTATKAIGIDLGLKDIATCSDGTVISNPKFYRKYEQKLGIAQRARNKKRVRALHAKIANSRKDHLHKASTKLVNENALIIVGDLSAKKLVKTKMAKSVLDTGFSALKTMLKYKCENAGVLFEEVQEVYTTQICSCCGEITSSSPKGKTDLGIREWECMSCGTAHDRDINSALNILALGHKRLAVGITLF

SEQ ID NO: 4489 - protein, 386 aa, unidentified
MTIKTQVVKLKVNKTMQKHLDALCDYRRYCWNKGLETWQLMYEAHTLNKKDNPSPNERRVRNELVANKADWQYDLSARCLQLAIKDLANAWKNFFDKAQPDWGMPSFKSKKAPRQGFKTDRTKIVNGKLRLDRPRSISKEDWFDLKSYEALKMSEVKVVSIFKEKDSYYAALPYEEEISSKAKTYQKTAVDVNVGHFNYTEGQINVLPAKLQKLYKRIKHYQRMLARKREVNGKSAIKSNNYFAVRIKLQRDYRKTANIQNDLLQQFTTKLVDNYDQIVIEDLAVKQMMMTHVASKGMQRSLFSRFRQILTYKCDWYGKELILADKTYPSTQRCAKCGYVKTGNEKITLQGNKKHGTKHNEYICYECGYSNDRDENAVLNLLALVK

SEQ ID NO: 4490 - protein, 385 aa, unidentified
MIKTQVVKLKVNKTMQKHLDALCDYRRYCWNKGLETWQLMYEAHSLNKQDNLSPNERRVRDELVANKADWQYDLSARCLQLAVKDLANAWKNFFDKAQPDWGTPSFKSKKAPRQGFKTDRAKIVNGKLRLDRPRSISKEDWFDLKSYEALKMSEVKVGSIFKEKDSYYAALPYEEEISSKAKTYQKTAVDVNVGHFNYTEGQINVLPAKLQKLYKRIKHYQRMLARKREVNGKSAVKSNNYFAVRIKLQRDYRKTANIQNDLLQQFTTKLVDNYDQIVIEDLAVKQMMMTHVASKGMQRSLFSRFRQILTYKCDWYGKELILADKTYPSTQRCAKCGYVKTGNEKITLQGNKKHGTKHNEYICYECGYSNDRDENAVLNLLALVK

SEQ ID NO: 4491 - protein, 385 aa, unidentified
MIKTQVVKLKVNKTMQKHLDALCDYRRYCWNKGLETWQLMYEAHTLNKKDNPSPNERRVRDELVTNKADWQYDLSARCLQLAIKDLANAWKNFFDKAQPDWGIPSFKSKKAPRQGFKTDRAKIVNGKLRLDRPRSISKADWFDLKSYEALKMNEVKVISIFKEKDSYYAALPYEEEISSKAKNHQKTAVDVNVGHFNYTDGKINVLPAKLQKLYKRIKHYQRMLARKREVNGKLATKSNNYFAVRTKLQRDYRKVANIQNDLLQQFTTKLVDNYDQIVIEDLAVKQMMMTHVASKGMQRSLFSRFRQILTYKCNWYGKELILADKTYPSTQRCAACGYVKKGEEKITLQGNKKHGTKHNEYICYECGYKNDRDKNAVLNLLALAR

SEQ ID NO: 4492 - protein, 422 aa, unidentified
MNYNYRYRLKPTESQRETLDYHRDTCRQLYNHALYGFNQIPEDEGTVKQRVRKIRDELPDLKDWWDALTDIYSKVLQPTVMQIAKNINRLGQLKEQGYKVGELRWKSPREFRSFTYNQSGFELDKKSGQTVLSLSKLADIPIELHRPLPDDATVKEVTLKKEKTGEWFAIFGIEMDTEPPAKPPLAEIDTDEMVGIDVGILKYSHDTDGTAVESLDLSEERERLEREQRKLSRKEYESNNWQKQRRRVAECHLDIKRKRRDFLHKLSTYYAREYELVAVENLDVKGMLESPRNSRNTASAAWSTFTDMLETKCEREGTHFVEVDPDGTTKECANCGVETEKPLWVREHSCPACRFEADRDANAAWNVLSRGLTKLGVGHSELPPVETALPAGTAVVPAKRVLEAGSPCLKERAATPRVSRQG

SEQ ID NO: 4493 - protein, 250 aa, unidentified
MTEQIEEVPAELIQTRVYELRPNETMRRVLDEACDYRRYCWNQGLALWNEMYKARQALKSSLASDSKKLTEEQKVLLKEKPSPSERRVRNMLVADKKDWQYTQSARILQLAISDLGKAWNNFFDKAQPGWCKPKFRSKREARQGFKSDRSKIKDGILYLERARGSRVPKDQWRGFKLSEKPLSDEFGVVSYFKEKGRYYVAISYKIKAEDVKLPDKTGKATAVDVNVGHFDYTGGRVNVLPKKLDRIYKK

SEQ ID NO: 4494 - protein, 386 aa, unidentified
MTIKTQVVKLKVNKTMQKHLDALCDYRRYCWNKGLETWQLMYEAHTLNQKDNPSPNERRVRDELVANKADWQYDLSARCLQLAIKDLANAWKNFFDKSQPDWGIPSFKSKKAPRQGFKTDRAKIVNGKLRLDRPRSISKESWFDLKSYEALKMDEVKVVSVFKEKDNYYAALPYEEEIELKAKTQQKTAVDVNVGHFNYTEGQINILPAKLQKLYKRIKHYQRMLARKREVNGKLATKSNNYFAVRTKLQRDYRKAANIQNDLLQKFTTKLVNNYDQIVIEDLAVKEMMMTHVASKGMQRSLFSKFRRILTYKCDWYGKELILADKTYPSTQRCAQCGYVKKGEEKITLQGNKKHGTKHNEYVCYECGYKNDRDENAVLNLLALAK

SEQ ID NO: 4495 - protein, 386 aa, unidentified
MTIKTQVVKLKVNKTMQKHLDALCDYRRYCWNKGLETWQLMYEAHTLNQKDNPSPNERRVRDELVANKADWQYDLSARCLQLAIKDLANAWKNFFDKSQPDWGIPSFKSKKAPRQGFKTDRAKIVNGKLRLDRPRSISKESWFDLKSYEALKMDEVKVVSVFKEKDNYYAALPYEEEIELKAKTQQKTAVDVNVGHFNYTEGQINILPAKLQKLYKRIKHYQRMLARKREFNGKLATKSNNYFAVRTKLQRDYRKAANIQNDLLQKFTTKLVNNYDQIVIEDLAVKEMMMTHVASKGMQRSLFSKFRRILTYKCEWYGKELILADKTYPSTQRCAVCGYVKKGEEKITLQGNKKHGTKHNEYVCYECGYKNDRDENAVLNLLALAK

SEQ ID NO: 4496 - protein, 408 aa, unidentified
MTTPKKHSGDTGHARYTYRLRVSSTARVALLAEWDRCRWIWNECVAKSRQVHAHNRAHPDDKLTCGPAQLDKMLTEARARTRWLCEGASVPQQQIIRDFAKSRSRATKDIEKRLPTRQRAGMPRPKKKREALPTLNYTQRGFRLKDGHLHLAGGISLTVVWSRELPATPSSVRVYRDSLGHWHASFVVATETQPLPQTGAVLGVDWGVKETATTTSDPHDLPHPQHGRKAQAKLTRYDRMVARRKPARGQASSKGYREAKKWRAKTYAKIARQRQDTARKWAKRVVRDHDAIAVEDFRPKFLSRTIMARKAADAAIGATKQALVEMGRKHGRDIRLVHPAHTTMNCASCGARTKHALPLSERTYTCTACGVVSPRDKNSARVMLVRAGLNPAGVEGIRPAGAPLPEAA

SEQ ID NO: 4497 - protein, 406 aa, unidentified
MKINRGYRFKLRPTEEQAKMLFQHVGVCRLIYNLALEQRRDHHRQYRAATGKHISYVSQAAELTALRAEFDWIRAVTQTAQQQALRDLDRAYQNFFSGIAAYPSPRKKGVNDSFRLQGREVAFRRLNKSWGIAKLPKIGEVRFRWTRDIPGKLKNATISIDPLGWHISFSTEVEVEVDRNFGPTVGVDRGVVEAVAYSDGTFADFPKARIKGLDKKARRAARTLSRCRKGSNRRKVAKARVAALRAKAARVRKHFNHVETARLARIFGVVCIEALKTRNMTASAKGTVEEPGVNVRQKAGLNRSILEIGWFQFHQFLTYKLAAAGGELRLVDAAYTSITCSCCGIIEKTNRKSQAVYECADCGLSANADTNAAINILQAGTRPAWRERVAAPAKRKSHLEADGLAA

SEQ ID NO: 4498 - protein, 406 aa, unidentified
MKINRGHRFKLRPTEEQASLLFQHVGVCRLVYNLALEQRRDHHRQYRNCTGKHISYGSQAAELTALRAGFDWIRAVTQTAQQQALRDLDRAYQNFFSGIAAYPTPRKKGVNDSFRLQGREVAFRRLNKSWGLVKLPKMGEVRFRWTRDIPGKLKNVTISLDPLGWHISFSTEVEVEVGRNFGPTVGVDRGVVEAVAYSDGTFADFPKARIKSLDKKARRAARALSRCRKGSSRRKVARARVAALRAKAARVRKHFNHAETARLARSYGVVCIEALKTRNMTASAKGTVEEPGVNVRQKAGLNRSILEIGWFQFHQFLMYKLAAAGGELRLVNAAYTSITCSCCGIIEKTNRKSQAVYECVDCGLSANADTNAAINILQAGTRPAWRERVAAPAKRKSHLEADGLAA

SEQ ID NO: 4499 - protein, 432 aa, unidentified
MAEQIEEVPAELIQTRVYELHPNKTMRRVLDEACDYRRYCWNQGLALWNEMYKARQTLKSSLASDSKRLTEEQKVLLKEKPSPSERRVRNMLVADKKDWQYAQSARILQLAISDLGKAWNNFFDKAQPGWSKPKFRSKREARQGFKSDRSKIKEGILYLERARGSSVPKDQWRGFKLSEKPLSDEFGVVSYFKEKGRYYVAIPYKIKVEDVKQPDKTGKATAVDVNVGHFDYTGGRVNVLPKKLDRTYKKIKHYQRQLAKKRVKNGEAACESKNYLKTKAKLQAYYRKASNIQNDLMQKFTTELVKDYDKIVIENLSVKGMLMSHVASKGVHRSMFGKFKQILTYKCDWYGKDLILANKLYPSTQRCAACGNVKKGDDKITLYGNKKHGTKHNEYVCYNEKCPNYNKVVDRDKNAMLSLLALTEYPELNHAL

SEQ ID NO: 4500 - protein, 432 aa, unidentified
MAEQVKEAPAELIQTRVYELRPNKTMRKVLDEACDYRRYCWNQGLALWNEMYKARQTLKSSLSTDSKKLTEEQKVLLKDKPSPSERRVRNMLVADKKDWQYTQSARILQLAISDLGKAWNNFFDKAQPGWGKPKFRSKREARQGFKSDQSKIKDGILYLERARGSSVPKDQWRGFKLSEKPLSDEFGVVSYFKEKGRYYVAIPYKIKAEDIKLPDKTGKATAVDVNVGHFDYTGGRMNVLPKKLDKIYGKIKHYQRQLAKKQVKNGEAACESENYLKTKAKLQACYRKASNIQNELMQKFTTELVNNYDKIVIENLSVKGMLMSHVASKGVHRSMFGKFKQFLTYKCDWYGKELILANKLYPSTQRCATCGNVKKGDDKITLYGNKKHGTKHNEYVCYNQKCPNYNKVVDRDKNAMLSLLALTEHPELNHAL

SEQ ID NO: 4501 - protein, 386 aa, unidentified
MTIKTQVVKLKVNKTMQKHLDALCDYRRYCWNKGLETWQLMYEAHTLNQKDNPSPNERRVRDELVANKADWQYDLSARCLQLAIKDLANAWKNFFDKSQPDWGIPSFKSKKAPRQGFKTDRAKIVNGKLRLDRPRSISKESWFDLKSYEALKMDEVKVVSVFKEKDNYYAALPYEEEIELKAKNQQKTAVDVNVGHFNYTEGQINLLPAKLQKIYKRIKHYQRMLARKREVNGKLATKSNNYFAVRTKLQRDYRKAANIQNDLLQKFTTKLVNNYDQIVIEDLAVKEMMMTHVASKGMQRSLFSKFRRILTYKCDWYGKELILANKTYPSTQRCAACGYVKKGEEKITLQGNKKHGTKHNEYVCYECGYKNDRDENAVLNLLALAK

SEQ ID NO: 4502 - protein, 409 aa, unidentified
MTTPMEADGAGRARYTYRLRVSSSARTALEAEWARCRWVWNECVAKSRAVHLRNKTTGQEGDKRTCGPAQLDRMLTQARERTPWLREGSSVPQQQLIRDFGKSRAKAHKDIQERLPQRQRAGMPRWKKKRETLPTLNYTRRGFRLKDGRLHLAGGIVLRVVWSRSLPGDPSSVRVYRDSVGHWYCSFVVPAEVRPLPETGRVLGVDWGVRETATTTSNAHDLPHAQHGRKAQARLTRYDRMMARRRPKQGRAASKGYREAKKWRAKTYAKIARQRQDTGRKWAKKVVSDHDAVAVEDFRPKFLARSSMARKAADAAIGATKKALVEMGRKHGRDIRLVHPAHTTMDCASCGARTKHALPLSERTYTCTACGAVSPRDKNSARVMLVRAGLIPAGVEGVRPPGALLPEAA

SEQ ID NO: 4503 - protein, 399 aa, unidentified
MAVKGADGVGHARYTYRLRVSSTARAGLLAEWDRCRWVWNECVARSKKAHADGEKCGPARLDRMLTQARTVVPWLAEGSSVPQQQLIRDFGTSRAKALKDTRQRLPMHRRAGMPKHKKKREALPTLNYTRRGFRLKDGRLHLAGGIVLSVVWSRELPAEPSSVRVYQDSVGHWYALFVVPVQTEPLLRTGRVIGIDWGVKETATTTSAAHDLPHVEHGRKAQARLTRYDRMMAHRKPRKGQAASSGYREAKKWRAKTYQKIARQRQDTGRKWAKKVVRDHDAIAVEDFRPKFLARTTMARKAADAAIGATKQALVEMGRKHGRDVRLVHPAHTTMDCGSCGARTKHALPLSQRTYTCTICKAVSPRDKNSARVMLVRAGLAPAGVEGVRPPGAPLQGAA

SEQ ID NO: 4504 - protein, 407 aa, unidentified
MTTPRISEGSGRARYTCRLRVSSTARTALLAEWDRCRWVWNECVAKSRAVHGRNRAHPDGKLTCGPAQLDKMLTEARAKTPWLREGTSVPQQQTVRDFAKSRSKALKDIERRLPMRQGAGMPRHKKKREALPTLNYTTRGFRLKDGRLHLAGNIVLTVVWSRELSAAPSSVRVYRDVVGHWWASFVVATELQPLPGTGAVLGVDWGVKETATTTSDAHDLPHAEHGRKAQATLSRYDRMMARRKPKKGRAASKGYREAKKWRAKAYAKIARQRQDTARKWAKSVVRGHDAVAVEDFRPKFLAKTTMARKAADAAIGATKQALIEMGRKHGRDIRLVHPAHTTMDCASCGARTKHALPLSERTYTCTACGAVSPRDKNSARVMLVRAGLIPAGVEGARPLGALLPEAA

SEQ ID NO: 4505 - protein, 399 aa, unidentified
MAVKGADGVGHARYTYRLRVSSTARAGLLAEWDRCRWVWNECVARSKKAHADGEKCGPARLDRMLTQARTVVPWLAEGSSVPQQQLIRDFGTSRAKALKDTRQRLPMHRRAGMPKHKKKREALPTLNYTRRGFRLKDGRLHLAGGIVLSVVWSRELPAEPSSVRVYQDSVGHWYASFVVPVQTEPLLRTGRVIGIDWGVKETATTTSAAHDLPHVEHGRKAQARLTRYDRMMAHRKPRKGQAASSGYREAKKWRAKTYQKIARQRQDTGRKWAKKVVRDHDAIAVEDFRPKFLARTTMARKAADAAIGATKQALVEMGRKHGRDVRLVHPAHTTMDCGSCGARTKHALPLSQRTYTCTICKAVSPRDKNSARVMLVRAGLAPAGVEGVRPPGAPLQGAA

SEQ ID NO: 4506 - protein, 402 aa, unidentified
MGVGEGSRVRYTYRLRVSSTARVALEAEWARCRWVWNECVAKSKQVQERGRRTGVKETCGPAGLDRMLTEARRVMPWLREGSSVPQQQMIRDFGKARAKALKDIADRLPVNRRAGMPKLKKKRDTSLSLNYTTRGFQLRDGRLHLAKGIALTVVWSRELPSRPSSVRVYRDSLGHWYASFVVATSAEVLPATGVVIGIDWGVAETATTTSDAHDLPHAEFGSRAAQRLARYQRQMARRKPKHGQPNSRGYMESQRQAAKAHKKVARQRQDTGRKWAKRVVTDHDVIAVEDFKPTFLTKTTMARKAADAAIGATKAALVAMARKHGRDLRLINPAHTTMDCAQCGTRAKHRLPLSERTYTCTACGASSPRDRNSARVMLVRAGLNPAGAEGVRPVGALLPQAA

SEQ ID NO: 4507 - protein, 401 aa, unidentified
MKTPGAVVDAGHARYTYRLRVSSTAHSALLAEWDRCRWIWNECVARSKRAHRDGEKCGPARLDGMLTEARRATAPWLAEGSSVPQQQIIRDFAKSRAKALKDIKDRLSQGQRAGMPRHKKKREADPTLNYTRRGFRVKEGHLHLAGGIVLTVVWSRDLPADPSSVRVYRDSLGHWYASFVVPAELQPLPATGAVIGVDWGVRETATTTSEAHDLPHAEHGRKAKAKLTRYDRMMARRKPAKGRSASKGYREASRLRAKTCRKIARQRQDTARKWAKHVVTDHDAIAVENFHPKFLAKTSMARKAADAAIGATKTALLEMARKHARDVYLMHPAHTTMDCASCGARTKHALPLSERTYTCIACGAVSPRDKNSARVMLVRAGLNPAGVEGVGPLGAPLQEAA

SEQ ID NO: 4508 - protein, 406 aa, unidentified
MAQVGVVAEGGHARYTFRLRVSSTARTALAAEWDRCRWVWNECVAKSKAVYLRNKAAGEKQTCGPAQLDRMLTEARKTTSWLREGSSVPQQQIIRDFGRSRTKAYKDISERLPMTRRAGMPKWKTKREALPTLNYTRRGFRLKDGRLHLAGNIAVTVVWSRELPAQPSSVRVYQDSLGHWYASFVVPSQVQPLPETGRLLGVDWGVKETATTTSDAYDLPHAEHGKKARTKLTRYDRMMARRKPKKGQPASKGYREAKKLRAKAYKKVARQRADTGRKWAKKVVRDHDAIAVEDFRPKFLARTTMARKAADAAIGATKAALIEMGRKHRRDIRLVHPAHTTMDCAHCDARAKHRLPLGERTYTCTACGAVSPRDKNSAHVMLIRAGLNPAGADGGRPPGALLQEAA

SEQ ID NO: 4509 - protein, 432 aa, unidentified
MHYAYRFRLKPTAEQRELLDYHRDTCRQLYNHALTEFEQIPESVGTINQRVRQVRDQLTDLKDWWDELNDLYSTVAQAAVMRIEDSIKALSELKGKGYNVGSLNWKAPTDFRSFTYVQSGFEFDKKNGQTVLSLSKLTEIPIECHRDIPDEETVKEVTLKKEPTGEWYASFAVDDKVEPPKPSLEEIDDDDMVGIDVGILKYAHDTDGAAVESLDLSEERDKLEREQRNLSRKEHGSNNWEKKRQRVAECHQQIKRKRRDFLHKLSNYYAREYELVAVENLDVKEMLESPRNSRNTVSAAWNTFTDLLEYKCKREGTHFVEVEPAGTTKECANCGVETDKPLWVRGHSCPACGFEADRDANAVVRLRLTGSKRGAFATAWNILSRGLSQLGVGHSEETPVETALPTGTAVVPAKRVVEPGSPCLKERAKASE

SEQ ID NO: 4510 - protein, 417 aa, unidentified
MNYNYRYRLKPTQDQRETLDYHRDTCRQLYNHALYRFNQIPESEGTVKQRVRKIRDELPDLKDWWDALTNIYSKVLQPTVMQIAKNINALGKLKQQGYNVGELRWKSPREFRSFTYNQSGFELDKKSGQTVLSLSKLADIPIELHRPLPDDATVKEVTLKKEKTGEWFAIFGIEMDTNPPAKPSLEDIDTDEMVGIDVGILKYAHDTDGTAVESLDLSDERERLEREQRKLSRKEYGSRNWENQRQKVAACHLQIKRKRRDFLHKLSAYYAREYELVAVEDLDTKEMLESPGNSRNTASAAWNTFTSMLEHKCEREGTHFVEVDPAGTTKECASCGVKTDKPLWVREHSCPACGFEADRDANAAWNILSRGLSQLGVGHSEETPVETALPTGTAVVPAKRVVEPGSPCLKERAKASE

SEQ ID NO: 4511 - protein, 406 aa, unidentified
MTTPQTSEGAGHARYTYRLRVSSTARTGLETEWARCRWVWNECVAMSRKVHAANQGAAEKTTCGPAQLDKMLTEARDAMSWLREGASVPQQQTIRDFAKSRAKALKDIKARLPLRQRAGMPRIKRKRDALLTLNYTTRGFRLKDGRLHVAGGIALTVLWSRELPAAPTSVRIYQDSLGHWYASFVVATKAQPLPATGAVLGVDWGVKETATTTSDAHDLPHAEHGKNAAQRLARYQRMMARRKPARGQAASKGYRQARKQTAKLNKKVARQRQDTARKWAKSVVRDHDSIAVEDFRPKFLSRTTMARKAADAAIGATKTALIEMGRKHARDIRLVHPAHTTMDCAHCMTRAKHALPLSERTYTCTACGAASPRDRNSARVMLVRAGLNPAGAEGVRPPGALLPEAA

SEQ ID NO: 4512 - protein, 414 aa, unidentified
MIHRAFRYKLAPTPVQEEQLRQFSGVVRLVYNLALEQRRDWWRHYRRTTGERLNYIAQARELTALRKAFDWIAAVHVTPQQQALRDLETAYASFFAGRAGYPSPRKRGVHDGFRFQGREIAVTRLNRKWSAVRVPKIGWVKFRDTRPMRGRTMNATLSLDPTGWHISFANEIEHEPPVNSLPSVGIDRGVTCSLMLSSGEALNIPGKLRLLDRKKRKAQRVVARRKRGSVRRLKALRRVARISARAGRIRRDWQHRVTLDLARRFGTVVLEDLKTKNMTRSAAGTADAPGKNVRAKAGLNRAILEQGWHSFETLVAYKLEERGGYLCKVDPRHTSQTCSSCGAVDRESRKSQAAFACTTCGHRAHADHNAAINILRRNTASMLVEEGHWLSGEARTGRGLAASENPPALAGGRC

SEQ ID NO: 4513 - protein, 244 aa, unidentified
MIKTQVVKLKVNKTIQKHLDALCDYRRYCWNKGLETWQLMYEAHTLNKKDNPSPNERRVRDELVANKADWQYDLSARCLQLAIKDLANAWKNFFDKAQPDWGIPSFKSKKAPRQGFKTDRAKIVNGKLRLDRPRSISKADWFDLKSYEALKMNEVKVISIFKEKDSYYAALPYEEEISSKAKNHQKTAVDVNVGHFNYTDGKINVLPAKLQKLYKRIKHYQRMLARKREVNGKLATKSNNYFAV

SEQ ID NO: 4514 - protein, 432 aa, unidentified
MAEQIEEAPAELIQTRVYELHPNKTMRRVLDEACDYRRYCWNQGLALWNEMYKARQALKSSLASDSKRLTEEQKVLLKDKPSPSERRVRNMLVADKKDWQYTQSARILQLAISDLGKAWNNFFDKAQPGWGKPKFRSKREARQGFKSDQSKIKDVILYLERAKESSVPKEQWRGFKLSEKPLSDEFGVVSYFKEKGRYYVAIPYKIKAEDIKLPDKTGKATAVDVNVCHFDYTGGHMNVLPKKLDKIYGKIKHYQRQLAKKQVKNGEAACESENYLKTKAKLQACYRKASNIQNDLMQKFTTELVNNYDKIVIENLSVKGMLMSHVASKGVHRSMFGKFKQFLTYKCDWYGKELILANKLYPSTQRCAACGNVKKGDDKITLYGNKKHGTKHNEYVCYNQKCPNYNKVVDRDKNAMLSLLALTEHPELNHAL

SEQ ID NO: 4515 - protein, 432 aa, unidentified
MAEQIEEVPAELIQTRVYELHPNKTMRRVLDEACDYRRYCWNQGLALWNEMYKARQTLKSSLASDSKRLTEEQKVLLKEKPSPSERRVRNMLVADKKDWQYAQSARILQLAISDLGKAWNNFFDKAQPGWGKPKFRSKREARQGFKSDRSKIKEGILYLERARGSSVPKDQWRGFKLSEKPLSDEFGVVSYFKEKGRYYVAIPYKIKVEDVKQPDKTGKATAVDVNVGHFDYTGGRVNVLPKKLDRIYKKIKHYQRQLAKKRVQNGEAACESKNYLKTKAKLQAYYRKASNIQNDLMQKFTTELVKDYDKIVIENLSVKGMLMSHVVSKGVHRSMFGKFKQILTYKCDWYGKDLILANKLYPSTQRCAACGNVKKGDDKITLYGDKKHGTKHNEYVCYNEKCPNYNKVVDRDKNAMLSLLALTEYPELNHAL

SEQ ID NO: 4516 - protein, 420 aa, unidentified
MNYNYRYRLKPTEDQRETLDYHRDTCRQLYNHALYRFNQIPEDEGTVKQRVRKIRDELPDLKDWWDTLTDVYSKVLQPTVMRVAKNVKALGKLKEQGYKVGELRWKSPREFRSFTYNQSGFELDKKSGQTVLSLSKLAAIPIEFHRPLPDNATVKEVTLKKEKTGEWFAIFGIEMDTEPPAKPPLENIDTDEMVGIDVGILKYAHDTDGTAVESLDLSEERDRLEWEQRKLSRKERGSNKWQNQRRRVAECHLAIKRKRNDFLHKLSNYYAREYELVAVEDLDVKGMLESPRNSRNTASAAWNTFTDMLETKCEREGTHFVEVDPDGTTKECAQCGVETGKPLWVREHSCPACGFEADRDANAAWNILSRGLTELGVGHSEETPVESALPAGTPPVPAKRVVEAGSPCLKEPPKAASRQG

SEQ ID NO: 4517 - protein, 413 aa, unidentified
MYYAYKYRLKPSDAHREELDRHRDICRQLYNHTLYRLNEYQDEHGDLPSMTTLRSELPDLKKWWDGLSDVYSKVLQTVVERLFDNLKGLSKLKENGYAVGQLKWKPPREFRSFTYSQSGFKLDKKGGQTVLSLSKLADIPIRLHRAIPDDANLKQVTIKKEPTGEWFATFGVEMDREPPEPSENPEKCVGIDVGILKYAHDTDGTAVGSLDLSDERDRLEREQRKLSRKQHGSNNYEKQRRRVAECHADLRRKRRDFLHKLSAYYAREYDLVAVEDLNVKEMMETPSNSRNTASAAWRTFLSLLEYKCEREGTHFVAVNPRGTTKACASCGVSTDKPLWVREHSCPACGFEADRDANAAWNILSRGLEDVGVGYSESTPVETALPVDTPVSAKRVVEAGSPTLKERTASTVSE

SEQ ID NO: 4518 - protein, 420 aa, unidentified
MNYNYRYRLKPTEDQRETLDYHRDTCRQLYNHALYRFNQIPEDEGTVKQRVRKIRDELPDLKDWWDTLTDVYSKVLQPTVMRVAKNVKALGKLKEQGYKVGELRWKSPREFRSFTYNQSGFELDKKSGQTVLSLSKLAAIPIEFHRPLPDNATVKEVTLKKEKTGEWFAIFGIEMDTEPPAKPPLENIDTDEMVGIDVGILKYAHDTDGTAVESLDLSEERDRLEWEQRKLSRKERGSNKWQNQRRRVAECHLAIKRKRNDFLHKLSNYYAREYELVAVEDLDVKGMLESPRNSRNTASAAWNTFTDMLETKCEREGTHFVEVDPDGTTKECAQCGVETDKPLWVREHSCPACGFEADRDANAAWNILSRGLTELGVGHSEETPVESALPAGTPPVPAKRVVEAGSPCLKEPPKAASRQG

SEQ ID NO: 4519 - protein, 413 aa, unidentified
MRYTYRFRLDPTPEQRELLDQHRDTCRQLYNHALTEFEKIPESAGTLTQRVRQVRDQLTDLKVWWDELNDLYSTVAQAAVMRIKDSIKALSQLKQNGYNVGSLNWKAPKDFRSFTYIQSGFEFDSKNGQTVLSLSKLADVPLIKHRTIPDTETIKQVTIKKEPTGDWFASFVVDGKETPEKPTDPDRCVGIDVGILKYAHDTDGYAIESPDFSDERERLERAQRDLSRKEHGSTNWETQRQTVAERHADLKRKRRDFLHKLSNYYATEYDLVAVEDLDVKGLVELPRNSRNLAGAAWGTFLRMLEYKCEREGTHFVAVNPRGTTKECASCGVKTEKPLWMREHSCPACGFEADRDANAAWNILSRGLEEVGVGYSESTPVETALPVDTPVSAKRVVETGSPTLKERTASAVSE

SEQ ID NO: 4520 - protein, 413 aa, unidentified
MRYTYRFRLDPTPEQRELLDQHRDTCRQLYNHALTEFEKIPESAGTLTHRVRQVRDQLTDLKVWWDELNDLYSTVAQAAVMRIEDSIKALSQLKQNGYNVGSLNWKAPKDFRSFTYIQSGFEFDSKNGQTVLSLSKLADVPLIKHRTIPDTETIKQVTIKKEPTGDWFASFVVDGKETPEKPTDPDRCVGIDVGILKYAHDTDGYAIESPDFSDERERLERAQRDLSRKEHGSTNWETQRQTVAERHADLKRKRRDFLHKLSNYYATEYDLVAVEDLDVKRLVELPRNSRNRVGAAWGTFLRMLEYKCEREGTHFVAVNPRGTTKECASCGVKTEKPLWMREHSCPACGFEADRDANAAWNILSRGLEEVGVGYSESTPVETALPVDTPVSTKRVVETGSPTLKERTASAVSE

SEQ ID NO: 4521 - protein, 413 aa, unidentified
MYYAYKYRLKPSDAHREELDRHRDICRQLYNHTLYRLNEYQDEHGDLPSMTTLRSELPDLKKWWDGLSDVYSKVLQTVVERLFDNLKGLSKLKENGYAVGQLKWKPPREFRSFTYSQSGFKLNKKGGQTVLSLSKLADIPIRLHRAIPDDANLKQVTIKKEPTGEWFATFGVEMDREPPEPSENPEKCVGIDVGILKYAHDTDGTAVGSLDLSDERDRLEREQRKLSRKQHGSNNYEKQRRRIAECHADLRRKRRDFLHKLSAYYAREYDLVAVEDLNVKEMMETPSNSRNTASAAWRTFLSLLEYKCEREGTHFVAVNPRGTTKACASCGVSTDKPLWVREHSCPACGFEADRDANAAWNILSRGLEDVGVGYSESTPVETALPVDTPVSAKRVVEAGSPTLKERTASTVSE

SEQ ID NO: 4522 - protein, 413 aa, unidentified
MRYTYRFRLDPTPEQRELLDQHRDTCRQLYNHALTEFEKIPESAGTLTHRVRQVRDQLTDLKVWWDELNDLYSTVAQAAVMRIEDSIKALSQLKQNGYNVGSLNWKAPKDFRSFTYIQSGFEFDSKNGQTVLSLSKLADVPLIKHRTIPDTETIKQVTIKKEPTGDWFASFVVDGKETPEKPTDPDRCVGIDVGILKYAHDTDGYAIESPDFSDERERLERAQRDLSRKEHGSTNWETQRQTVAERHADLKRKRRDFLHKLSNYYATEYDLVAVEDLDVKGLVELPRNSRNRAGAAWGTFLGMLEYKCEREGTHFVAVNPRGTTKECASCGVKTGKPLWMREHSCPACGFEADRDANAAWNILSRGLEEVGVGYSESTPVETALPVDTPVSAKRVVETGSPTLKERTASAVSE

SEQ ID NO: 4523 - protein, 413 aa, unidentified
MYYAYKYRLKPSDAHREELDRHRDICRQLYNHTLYRLNEYQDEHGDLPSMTTLRSEIPDLKKWWDGLSDVYSKVLQTVVERLFDNLKGLSKLKENGYAVGQLKWKPPREFRSFTYSQSGFKLDKKGGQTVLSLSKLADIPIRLHRAIPDDANLKQVTIKKEPTGEWFATFGVEMDREPPEPSENPEKCVGIDVGILKYAHDTDGTAVGSLDLSDERDRLEREQRKLSRKQHGSNNYEKQRRRVAECHADLRRKRRDFLHKLSAYYAREYDLVAVEDLNVKEMMETPSNSRNTASAAWRTFLSLLEYKCEREGTHFVAVNPRGTTKACASCGVSTDKPLWVREHSCPACGFEADRDANAAWNILSRGLEDVGVGYSESTPVETALPVDTPVSAKRVVEAGSPTLKERTASTVSE

SEQ ID NO: 4524 - protein, 413 aa, unidentified
MRYTYRFRLDPTPEQRELLDQHRDTCRQLYNHALTEFEKIPESAGTLTHRVRQVRDQLTDLKVWWDELNDLYSTVAQAAVMRIEDSIKALSQLKQNGYNVGSLNWKAPKDFRSFTYIQSGFEFDSKNGQTVLSLSKLADVLLIKHRTIPDTETIKQVTIKKEPTGNWFASFVVDGKETPEKPTDPDRCVGIDVGILKYAHDTDGYAIESPDFSDERERLERAQRDLSRKEHGSTNWETQRQTVAEHHADLKRKRRDFLHKLSNYYATEYDLVAVEDLDVKGLVELPRNSRNRVGAAWGTFLGMLEYKCEREGTHFVAVNPRGTTKECASCGVKTEKPLWMREHSCPACGFEADRDANAAWNILSRGLEEVGVGYSESTPVETALPVDTPVSAKRVVETGSPTLKERTASAVSE

SEQ ID NO: 4525 - protein, 413 aa, unidentified
MRYTYRFRLDPTPEQRELLDQHRDTCRQLYNHALTEFEKIPESAGTLTQRVRQVRDQLTDLKVWWDELNDLYSTVAQAAVMRIEDSIKALSQLKQNGYNVGSLNWKAPKDFRSFTYIQSGFEFDSKNGQTVLSLSKLADVPLTKHRTIPDTETIKQVTIKKEPTGDWFASFVVDGKETPEKPTDPDRCVGIDVGILKYAHDTDGYAIESPDFSDERERLERAQRDLSRKEHGSTNWETQRQIVAERHADLKRKRRDFLHKLSNYYATEYDLVAVEDLDVKGLVELPRNSRNRAGVAWGTFLGMLEYKCEREGTHFVAVNPRGTTKECASCGVKTEKPLWMREHSCPACGFEADRDANAAWNILSRGLEEVGVGYSESTPVETALPVDTPVSAKRVVETGSPTLKERTASAVSE

SEQ ID NO: 4526 - protein, 413 aa, unidentified
MRYTYRFRLDPTPEQRELLDQHRDTCRQLYNHALTEFEKIPESAGTLTQRVRQVRDQLTDLKLWWDELNDLYSTVAQAAVMRIEDSIKALSQLKQNGYNVGSLNWKAPKDFRSFTYIQSGFEFDSKNGQTVLSLSKLADVPLTKHRTIPDTETIKQVTIKKEPTGDWFASFVVDGKETPEKPTDPDRCVGIDVGILKYAHDTDGYAIESPDFSDERERLERAQRDLSRKEHGSTNWETQRQIVAERHADLKRKRRDFLHKLSNYYATEYDLVAVEDLDVKGLVELPRNSRNRVGAAWGTFLGMLEYKCEREGTHFVAVNPRGTTKECASCGVKTEKPLWMREHSCPACGFEADRDANAAWNILSRGLEEVGVGYSESTPVETALPVDTPVSAKRVVETGSPTLKERTASAVSE

SEQ ID NO: 4527 - protein, 432 aa, unidentified
MAEQIEEVPAELIQTRVYELHPNKTMRKVLDEACDYRRYCWNQGLALWNEMYKARKAIKSSLASDPKKLTEEKKVLLKEKPSPSERRVRNMLVADKKDWQYTQSARILQLAISDLGKAWNNFFDKAQPGWGKPKFRSKREARQGFKSDRSKIKDGILYLERARRSSVPKDQWCGFKLSENPLSDEFGVVSYFKEKGRYYVAIPYKIKAEDVKLPDKTGKATAVDVNVGHFDYTGGRVNVLPKRLDRIYKKIKHYQRQLAKKRVKNGEAARESINYLKTKAKLQACYRKAGNIQNDLMHKFTTELINDYDKIVIENLSVKGMLMSHVASKGVHRSMFGKFRQILTYKCNWYGKELILANKLYPSTQRCAACGNVKKGDDKITLYGNKKHGTKHNEYVCYNEKCPNYNKVVDRDKNAMLSLLALTEHPELNHAL

SEQ ID NO: 4528 - protein, 427 aa, unidentified
MAEQIEEVPAELIQTRVYELHPNKTMRRVLDEACDYRRYCWNQGLALWNEMYKARQALKSSLASDSKKMTEEQKVLLKDKPSPSERRVRNMLVADKKDWQYTQSARILQLAISDLGKAWNNFFDKAQPGWGKPKFRSKREARQGFKSDRSKIKDGILYLERAKGSSVPKYQWRGFKLSEKPLSDEFGVVSYFKEKGRYYVAIPYKIKAEDVKLPDKTGKATAVDVNVGHFDYTGGRVNVLPKKLDRIYKKIKHYQRQLAKKQVKNGEAACESENYLKTKAKLQACYRKASNIQNDLMHKFTTELVKDYDKIVIENLSVKGMLMSHVASKGVHRSMFGKFKQILTYKCDWYGKDLILPSTQRCAACGNVKKGDDKITLYGNKKHGTKHNEYVCYNEKCPNYNKVVDRDKNAMLSLLALTEYPELNHAL

SEQ ID NO: 4529 - protein, 400 aa, unidentified
MEAAKEADVAGLARFTYRLRVSSTAQAGLLAEWGRCRWVWNECVARSKKARADGEECGPARLDRMLTEARAITPWLTRGASVPQQQMIRDFGKSRAKALKDIKNRLPVRQRAGMPRHKKKHEADPSLNYTRLGFRLKDGQIHLAGGIVLTVVWSRDLPSEPSSVRVYRDSLGHWYASFVVPAEVEPLPATGRALGVDWGVVETATTTSDAHDLPHAEHGRKAKAKLSRYDQMMARRKPKKGQAASKGYREAQRWRAKTYQKIARQRQDAARKWAKKVVRDHDAIAVEDFRPKFLARTSMARKAADAAIGTTKKALIEMGRKHGRDVRLVHPAHTTMDCGRCGARTKHALPLSERTYTCTTCGLVSPRDKNSARVMLVRAGLAPAGVEGVRPPGALLQEAA

SEQ ID NO: 4530 - protein, 288 aa, unidentified
MGREGRVDHDIGRGKRRAAEEPPAVLTGRRYLLALTDVQTGQAERFGAICRAVWNTGLQQRREYRRRGAWINYVQQARQMAEAKKDLDCSWLAEAPSHIPQQTLRDLEKACQAHGTGKVRWRSKSRTAPAFRFPDPNQIRVERLNRRWGRVRLPKLGWVRFRWSRPLGGPIRNATVARDGGRWYISFCVEDGVTGVAPTDAPGVNVRQKAGLNRAILNKGWGGVLLALEHTARYHGATVVSVNPAYTSQRCSRCTLVDANSRKSQAEFTCTGCGHRDNADVNAAKNMP

SEQ ID NO: 4531 - protein, 417 aa, unidentified
MIHRAFRYKLAPTGEQEVLLRQFAGVVRLVYNLALEQRRDWWRHYQRQTGNRLNSIAQARELTALRAAFDWIAAVHVTPQQQALRDLDKAYANVFAGRAGYPARKKGVNGAFRFQGREIEVKRLNGKWSAARLPRIGWVKFRDTRRLRGKTMNVTVSLAANGWHIAFACEIDHAVPPNDLPAVGIDRGVANTLTLSTGEHWWMPAGLAEIEPRKRRAQRVLARRKRGSRRHAKARRRVAALQAGAARIRQDWRHKASLDIARRFATVVLEDLATRNMTRSARGTVDAPATNVCQKAGLNRAILEQGWHGFETVLADKLEERGGYLCKVDPRHTSQTCSACAAVDRESRESQASFRCCQCGLRAHADHNAAINILRRNTASMIVEEGQRLSVEAITIGGASRPLGNPPLQAGKMLMKE

SEQ ID NO: 4532 - protein, 432 aa, unidentified
MAEQVKDAPAELIQTRVYELRPNKTMRKVLDEACDYRRYCWNQGLALWNEMYKARQTLKSSLSTDSKKLTEEQKVLLKDKPSPSERRVRNMLVADKKDWQYTQSARILQLAISDLGKAWNNFFDKAQPGWGKPKFRSKREARQGFKNDQSKIKDGILYLERAKESSVPKDQWRGFKLSEKPLSDEFGLVSYFKEKGRYYVAIPYKIKAEDIKLPDKTGKATAVDVNVGHFDYTGGRMNVLPKKLDKIYGKIKHYQRQLAKKQVKNGEAACESENYLKTKAKLQACYRKASNIQNDLMQKFTTELVNNYDKIVIENLSVKGMLMSHAASKGVHRSMFGKFKQISTYKCDWYGKDLILANKLYPSTQRCAACGNVKKGDDKITLYGNKKHGTKHNEYVCYNEKCPNYNKVVDRDKNAMLSLLALTEHPELNHAL

SEQ ID NO: 4533 - protein, 385 aa, unidentified
MIKTQVVKLKVNKTIQKHLDALCDYRRYCWNKGLETWQLMYEAHTLNKKDNPSPNERRVRDELVANKADWQYDLSARCLQLAIKDLANAWKNFFDKAQPDWGIPSFKSKKAPRQGFKTDRAKIVNGKLRLDRPRSISKADWFDLKSYEALKMNEVKVISIFKEKDSYYAALPYEEEISSKAKNHQKTAVDVNVGHFNYTDGKINVLPAKLQKLYKRIKHYQRMLARKREVNGKLATKSNNYFAVRTKLQRDYRKVANIQNDLLQQFTTKLVDNYDQIVIEDLAVKQMMMTHVASKGMQRSLFSRFRQILTYKCDWYGKELILADKTYPSTQRCAACGYVKKGEEKITLQGNKKHGTKHNEYICYECGYSNDRDENAVLNLLALVK

SEQ ID NO: 4534 - protein, 413 aa, unidentified
MYYAYKYRLKPSDAHREELDRHRDICRQLYNHALYRFDQIPEDAGTLNQRVRSIRDEIPSLKEWWDSLSDVYSTVLQTAVMRIEQNVKGLSKLKENGYRVGQLTWKPPREFRSFTYSQSGFKLDKKGGQTVLSLSKLADVPIRLHRDIPDDAKLKQVTVKKEPTGEWFATFGVETPDDPPAKPENPEKCVGIDVGILTYAHDTDGTAVGSLDHSDERERLEREQRKLSRKEHGSANYETQRRRVAECHADLRRKRRDFLHKLSNYYAKEYDLVAVEDLNVKGMMQFNSNSRNRASAAWSTFLRMLEYKCEREGTHFISVDPRNTTKECAACGVKSDKPLWVREHSCPSCSFTADRDWNAAWNILRRGIKQLGAGRSESTPVETALPTGTTSVPAKRVLEAGSPTLKRESQDER

SEQ ID NO: 4535 - protein, 414 aa, unidentified
MYYAYKYRLTPSDAHREELDRHRDICRQLYNHALYRFDQIPEDAGTLNQRVRSIRDEIPSLKEWWDGLSDVYSTVLQTAVMRIEQNVKGLSALKENGYGVGQLTWKPPREFRSFTYSQSGFELDKKGGQTVLSLSKLADIPIRLHRAIPDDATLKQVTVKKDPTGEWFATFGIEMDREPPEPPANPERCVGIDVGILKYAHDTDGTAVGSLDLSDERERLEREQRKLSRKQHGSNNYEKQRRQVAECHADLRRKRRDFLHKLSNYYAREYDLVAVEDLNVEGMMESPSNSRNTASAAWRTFISLLEYKCEREGTHFVAVNPRGTTKECASCGVSTEKPLWVREHSCPACGFEADRDANAAWNILSRGLEDVGVGYSESTPVETALPVDTPVSAKRVVEAGSPTLKERTASAVSE

SEQ ID NO: 4536 - protein, 414 aa, unidentified
MYYAYKYRLKPSDAHREELDRHRDICRQLYNHALYRFDQIPEDAGTLNQRVRSIRDEIPSLKEWWDGLSDVYSTALQTAVMRIEQNVKGLSALKENGYGVGQLTWKPPREFRSFTYSQSGFELDKKGGQTVLSLSKLADIPIRLHRAIPDDATLKQVTVKKEPTGEWFATFGVETPDAPPEKPEKPEKCVGIDVGILTYAHDTDGTAVGSLDLSDERERLEREQRKLSRKQHGSNNYEKQRRRVAECHADLRRKRRDFLHKLSNYYVREYDLVAVEDLNVKGMMESPSNSRNTASAAWRTFISLLEYKCEREGTHFVTVNPRGTTKECASCGVSTEKPLWVREHSCPACGFEADRDANAAWNILSRGLEDVGVGYSESTPVETALPVDTPVSAKRVVEAGSPTLKERTASAVSE

SEQ ID NO: 4537 - protein, 414 aa, unidentified
MYYAYKYRLTPSDAHREELDRHRDICRQLYNHALYRFDQIPEDAGTLNQRVRSIRDEIPSLKDWWGDLSDVYSTVLQTAVMRIEQNVKSLGGLKQNGYGVGQLTWKPPREFRSFTYSQSGFKLDKKGGQTVLSLSKLADIPIRLHRAIPDDATLKQVTVKKDPTGEWFATFGIEMDREPPEPPANPERCVGIDVGILKYAHDTDGTAVGSLDLSDERERLEREQRKLSRKQHGSNNYEKQRRQVAECHADLRRKRRDFLHKLSNYYAREYDLVAVEDLNVEGMMESPSNSRNTASAAWRTFISLLEYKCEREGTHFVAVNPRGTTKECASCGVSTEKPLWVREHSCPACGFEADRDANAAWNILSRGLEDVGVGYSESTPVETALPVDTPVSAKRVVEAGSPTLKERTASAVSE

SEQ ID NO: 4538 - protein, 368 aa, unidentified
MIRYKTEIKPNKKQIKEINKTINACKFVYNKFIEINKIRYNNGLKFLNHMKFSVWYNNEFIPNNEDKKWTKEVSTKAIKQAMANAENSYARFWNKTSGYPNFKNKRSSGSYYLIGTIKIERHRIKLPNLKWVRLKEKGYIPKHNIKSATISKEFDRYYVSVLVDEEPKIIFKKPQTEGIGIDLGLKDTLFTPSGVKITDLRKNKRLIKLNKSLKRQQRKLSRKQKKSNNWFKQLLKVQRLYRKISNLKRDIKRKNILSIVQENPQFITIENLNIKGMMKNKRLSNAFQQIGLGYIVKWLKWKCYQYGIELRQVDRFYPSSQICNQCGNRQKMPLNKRVYKCENCGTIEDRDINASINLKQAKEYTVLV

SEQ ID NO: 4539 - protein, 442 aa, unidentified
MIEEKRNKIKNSLRITRERRKTQDVIILKLKIDNDKLNNNTIKALNTIFLEAKWLYNYVINKEFNNDIFNIDPKIKNVNVYVKDHYETRKLKYLSSQMKEEIINRAIDNIRGLHKLKEKGLKIGKLKFKSFITSIPLNQYTITYKIINNNYIKIQNIKQLLKVNGLDNLECYYEPANALLINNNNNYYINITAYRNKYILEKPVNNQKIISFDLGIKNQLTCSNGSILNYNIPKSKKEIRLQRSLSRKAKYAEGTNSKNKLSKKQSKNYYKNKNKLNKEQTKTTNKRKDTINKIVHYLTSNYDIVITQNDNIRGWKHHYGRKIESTGIGGIIDALKHKASTLILLDKFIPTTKECSNCHNKYDIKLDERIYQCHNCGFIIDRDYNSSLNDMYYGIKKLNELLKIKNRKLNNYFKKYNINLNVPMERRELTPVEIIASGFEGL

SEQ ID NO: 4540 - protein, 400 aa, unidentified
MRRLQAFKFELMPNGEQQRDMRRFAGSCRFVYNKALALQKGNYEAGGKFIGYVAMAKHLTEWRNGGETPWLKDAPVHPLQHALKDMERAYKNFFAKRAAFPKFKKRGQRDSFRYPDPTQFKLDQPNGRIFLPKLGWMRLRLSRPVLGELRNATVSFNAGKWCVSIQTEREVEQPVPHATSVIGIDVGIARFATMSDGTFIAPLNSFRKHEARLRRCQRAMSRKVKFSNSWKKAKARVQRIHARIGNARRDYLHKATTTISKNHAMACIEDLQVRNMSRSAAGSIDAPGKNVRAKSGLNKAILDQGWCEFRRQLEYKLAWNGGWLVAVPPANTSRTCPACGYVSADNRTTQEKFACVECSYEENADVVGALNILARGHRVAACGEPVKSSRSMKQEPAAAT

SEQ ID NO: 4541 - protein, 491 aa, unidentified
MNKMAKENPSNYKTLQIWIKKGHRMYSYFQECCHNAKNMYNTTNFYIRQVYTGLTQEKELQPLQKEVLANIHKNIGKMNDTQLLAYQKKLEKEKLKPKEEQKEITCNLFSEPNFEKPYVDYNFLDALFKAMIQNDYRSLPTQCSQSIMKGVFQNWKSFFASLKDYKKNPNKYAGPPRIPKYIRSSEKEILYTNQDCIIKNDRFLKFPKTKLKLNIGKLGFTEGKLKQVRVIPKYNEYVVELVIDVPYEQQMIEENARYMSIDLGIDNLATIVTNTGMKPVLVKGKHVKSINQYYNKMKSHFTSILRNGKQTNEGPFTSKRIEKLHQKRYLKIKDVFHKVSHHIVKLAQEEVCKIVIGQNKGWKQETNMGKRNNQSFCHIPHNLLIQMITYKANAVGIQVVVTEESYTSKASFLDNDFIPTYGENDQNTTFSGKRIKRGIYRSANKTLIHADVNAAANILRKVIPNAWTNGIEGLGVKQLANVLTPLTLIVR

SEQ ID NO: 4542 - protein, 426 aa, unidentified
MAKQVVTRTYTASIRNQSRVSDDLDALGFAASKLWNVGRWTCSRIWGEIGHIPNHTELTAYLKTHERYDDLHSQSSQRVLQELAEAFRGWYGKRRNGDMRANPPGYRKHGDEHPRSTVTFKAAGFKLDTQYNRVRLSQGANLKNYWSDFILCTFHTRPDVDLSTVETVQQVKAVWTGDEWELRFVCKVEIEASESPGEKTVGVDLGIKNFAALAYEDGHSELYPLNCLKQDDYYFSKRIARCDDSNSEQVTRLNHKKSARRTHYFHTLSKHIVERCVEEGVGTIVVGNLSDIRVDEETNEAKNWGRHGNLDLHSWAFDRFRKLLTYKSETEDITVEQESERDTSKSCSCCGRKRDGNRVERGLYVCDTCGTVANADVNGAENIRQKVSLSSPNLSVNRSNGWLAQPSTFLFDKETGAFAPEERVRS

SEQ ID NO: 4543 - protein, 426 aa, unidentified
MAKQVVTRTYTASIRNQSRVSDDLDALGFAASKLWNVGRWTCSRIWGEIGHIPNHTELTAYLKTHERYDDLHSQSSQRVLQELAEAFNGWYGKRRNGDMRANPPGYRKHGDEHPRSTVTFKAAGFKLDTQYNRVRLSQGANLKNYWSDFILCTFHTRPDVDLSTVETVQQVKAVWTGDEWELHFVCKVEIEASESPGEKTVGVDLGIKNFAALAYEDGHSELYPLNCLKQDDYYFSKRIARCDDSNSEQVTRLNHKKSARRTHYFHTLSKHIVERCVEEGVGTIVVGNLSDIRLDEETNEAKNWGRHGNLDLHSWAFDRFRKLLTYKSETEDITVEQESERDTSKSCSCCGRKRDGNRVERGLYVCDTCGTVANADVNGAENIRQKVSLSSPNLSVNRSNGWLAQPSTFLFDKETGAFAPEERVRS

SEQ ID NO: 4544 - protein, 492 aa, unidentified
MNKMAKENPSNYKTLQIWIKKGHRMYSYFQECCHNAKNMYNTTNFYIRQVYTGLTQEKELQPLQKEVLANIHKNIGKMNDTQLLAYQKKLEKEKLKPKEEQKEITCNLFSEPNFEKPYVDYNFLDALFKAMIQNDYRALPTPCSQSIMKGVFQNWKSFFASLKDYKKNPNKYAGPPRIPKYIRSSEKEILYTNQDCIIKNDRFLKFPKTKLKLNIGKLGFTEGKLKQVRVIPKYNEYVVELVIDVPYEQQMIEENARYMSIDLGIDNLATIVTNTGMKPVLVKGKHVKSINQYYNKMKSHFTSILRNGKQTNEGPFTSKRIEKLHQKRYLKIKDVFHKVSHHIVKLAQEEEVCKIVIGQNKGWKQEINMGKRNNQSFCHIPHNLLIQMITYKANAVGIQVVVTEESYTSKASFLDNDFIPTYGENDQNTTFSGKRIKRGIYRSANKTLIHADVNAAANILRKVIPNAWTNGIEGLGVKQLANVLTPVTLIVR

SEQ ID NO: 4545 - protein, 489 aa, unidentified
MTKENSSNYKTLQIWIKKGHRMYSYFQECCHNAKNMYNTTNFYIRQVYTGLTQEKELQPLQKEVLDHIHKNIGKMNDTQLLAYQKRLEKEKLKPKEEQKEITCNLFSEPNFEKPYVDYNFLDALFKAMIQNDYRALPTQCSQSIMKGLFQNWKSFFASLKDYKKNPNKYAGMPRIPKYIRSSEKEMLYTNQDCIIKNSRFLKFPKTKLQLNIGKLGFTEGKLKQVRVIPKYNEYVVELVIDVPSEQQMIEENARYMSIDLGIDNLATIVTNTGMKPVLVKGKHVKSINQYYNKMKSHFTSVLRNGKQTNEGPFTSKRIEKLHQKRYLKIKDVFHKVSHHIVKLAQEEEVCKIVIGQNKSWKQETNMGKRNNQSFCHIPHSLLIQMITYKANAVGIQVVVTEESYTSKASFLDNDFIPTYGENDQKTTFSGKRIKRGIYRSANKTLIHADVNAAANILRKVIPNAWTNGIEGLGVKQLANVLTPLTLIVR

SEQ ID NO: 4546 - protein, 489 aa, unidentified
MAKENPSNYKTLQIWIKKGHRMYSYFQECCHNAKNMYNTTNFYIRQVYTGLTQEKELQPLQKEVLANIHKNIGKMNDTQRLAYQKKLEKEKLKPKEEQKEITCNLFSEPNFEKPYVDYNFLDALFKAMIQNDYRALPTQCSQSIMKGVFQNWKSFFASLKDYKKNPNKYAGPPRIPKYIRSSEKEILYTNQDCIIKNDRFLKFPKTKLKLNIGKLGFTEGKLKQVRVIPKYNEYVVELVIDVPYEQQMIEENARYMSIDLGIDNLATIVTNTGMKPVLVKGKHVKSINQYYNKMKSHFTSILRNGKQTNEGPFTSKRIEKLHQKRYLKIKDVFHKVSHHIVKLAQEEEVCKIVIGQNKGWKQEINMGKRNNQSFCHIPHNLLIQMITYKANAVGIQVVVTEESYTSKASFLDNDFIPTYGENDQNTTFSGKRIKRGIYRSANKTLIHADVNAAANILRKVIPNAWTNGIEGLGVKQLANVLTPLTLIVR

SEQ ID NO: 4547 - protein, 415 aa, unidentified
MKLSFKFYPKLNTQQLDIIEELSYHTTRLYNIANYDCRENEVKSYVEMSKLYKANYHKDFLHSHTYQHCLKVLEKNWKSYFVSIKDYKKNPNKYLGTPRQPKFKNTNNKKNEVIFTNFAIRYQDQVLKLSLSKAMKSTFKVQSLNFNMKDIKIPIDLDELQQIKIKWDNSSKQWYLIMIYNKEEVNLTDSYNNIMSIDLGLDNLATITFEQNTNLYIIDGKYAKSKNSYYNKKIAKLTSIAMKQCKDSKHFKRTKKIIKLQTKRKNFIKDYIHKSSKKIIDLAIINKCHTIVIGDFNGVKQENDAKSFVQIPQQELVDKVKYKAQLLGIEVAMQNESYTSGCSALDLEDIGKKYYNKSRRIHRGLFVSNNGIKINADVNGSINILRKYLKCSPKSLKMIMDNGVLDTPIRLRIAY

SEQ ID NO: 4548 - protein, 400 aa, unidentified
MQRLQAFKFELMPTGEQQRDMRRFAGSCRFVYNKALALQRDNYATGGKFISYVAMAKHLTAWRNGSETAWLKDSPVHPLQHALKDLERAYKNFFGKRAAFPRFKKKGKSDRFRYPDPKQIKLEQGNSRIFLPKLGWLRYRNSRRVLGELRNATVSQSAGKWFVSIQTQREVDRPVPQATSAVGIDVGIARFATMSDGTFLSPLNSFKRHEPRLRGAQRAMSRKVKFSNNWKKAKARVQRIHARIGNARRDYLHKATTTISKNHAMVCIEDLQVRNMSRSAAGSVDAPGKNVRAKSGLNKAILGQGWFEFRRQLEYKLKWSGGWLVAVPPVNTSRTCPACGCVSADNRTTQAKFACVECTYEENADVVGALNILARGHRVAACGELVQSGRSVKQEPAEAI

SEQ ID NO: 4549 - protein, 413 aa, unidentified
MKLSFKFRPNINPTQLEIIEELSYHITKLYNIISYDLRKNGFKNYYEIEKLYKNNWHCDFLHSHTRQQMFKILEQNWKSYFASIKDFGVNPSKYKGLPRPPKFKNTERNKNEIIFTNLAIRFQDGILKLSLSKSIQKLFKVDSLNFEVSNKLQSLINWNRLQQARFNYDKVQKCWYLIVIYNKDEVENSNDNVMSIDIGLDNLATITFKNGINQYVYCGKKLKSVNSYANKRIAYLQAIEMKKYGSDKFKNTKEINRIRKYRNNYINDYLHKVSKNIIDKAIKNNVGKIVIGKLKDIKQDMNYNKSFVQIPIQRLVELITYKAKLKGIKIKLQEESYTSGCSAIDLEPVTKKYYNKSRRITRGLFKSGYGILNADINGSLNILRKSEKCIPDLVNAMRDKGNWTHPQRIRIAC

SEQ ID NO: 4550 - protein, 414 aa, unidentified
MLNMAKHMKTYKFPAPPEYHTKCKELSKLAGRVYSKTVSLVRKIHKKKGFWLSMNTVQKYILRWAQNIPLHSQTKQALVQRYFEALKSYFKASKTNQGLKPPFRTPKYTNVVWKNQAVKLLEDGTLRLAMGNGNDPLYIPTTLPKEVDIRRVELVYDKRQDKYFFHVTVSFESQTNISGSKVVGVDLGVVHPIVASTEDKAVIYNGGVLNSKLRYRNKKLAELQKKLAKKKPGSRRYRKLVRAKRRLLAKLYNQIKDILHKYTTHFVGWCLTEGVGTIAIGDLRGIRDRVDYNSTANQKIHQWLFRKISDLIKTKAEALGIEVVFVDESYTSQTCPVCGAKHKTSTRNFRCLGCGFEWHRDAVGALNIRKKYTGESLVVGALASPVGVMYNSHLRCPVAMWSPWKPTFEWVKTS

SEQ ID NO: 4551 - protein, 424 aa, unidentified
MARSVNIAPEVQNMAKHMKTYKFPAPPEYHTKCKELSKLAGRVYSKTVSLVRKIHKKKGFWLSMNTVQKYILRWAQNIPLHSQTKQALVQRYFEALKSYFKASKTNQGLKPPFRTPKYTNVVWKNQAVKLLEDGTLRLAMGNGNDPLYIPTTLPKEVDIRRVELVYDKRQDKYFFHVTVSFESQTNISGSKVVGVDLGVVHPIVASTEDKAVIYNGGVLNSKLRYRNKKLAELQKKLAKKKPGSRRYRKLVRAKRRLLAKLYNQIKDILHKYTTHFVGWCLTEGVGTIAIGDLRGIRDRVDYNSTANQKIHQWLFRKISDLIKTKAEALGIEVVFVDESYTSQTCPVCGAKHKTSTRNFRCLGCGFEWHRDAVGALNIRKKYTGESLVVGALASPVGVRYNSHLRCPVIMWSPWKPTFEWAKTS

SEQ ID NO: 4552 - protein, 460 aa, unidentified
MNPTTPTQPTVDGKAGYSTPTDTINITSFITGYEARNESNHPNLRGPITNQQQVRDDLDQLGWAASKLWNVGRYYAQKQWDETGKIPDDGELKAELKGHERYTDLHSQSSQRVLEELAEAFNGWFGKRRNGDDRARPPGYRKHGDSHPRSTVSFKAAGFKHDAQFTRVRLSKGRNLKKHRSDFILCEYQTRPDVDLTAWDIQQVRAVYKHDEWRLQFVCRTTIDPEPPGDEVAGVDLGICNFAAVSFGGESVLYPGGALKEDEYYFTKKKAKCDDSSSREATRLDRKRAGRRTHFLHALSKSIVNECVERGVGTLVVGDLGGIREDDENGEPRNWGDHGNLDLHGWAFDRFTTLLDYKAEAEGIDVELVSERDTSKSCSACGHTDDNQRVERGLYVCEKCNTVANADVNGAENIRQKVLPSLATDGGDRDNGWLAQPAVRLFDRSEGRFAPREQVVNHEP

SEQ ID NO: 4553 - protein, 492 aa, unidentified
MNKMAKENPSNYKTLQIWIKKGHRMYSYFQECCHNAKNMYNTTNFYIRQVYTGLTQEKELQPLQKEVLANIHKNIGKMNDTQLLAYQKKLEKEKLKPKEEQKEITCNLFSEPNFEKPYVDYNFLDALFKAMIQNDYRALPTPCSQSIMKGVFQNWKSFFASLKDYKKNPNKYAGPPRIPKYIRSSEKEILYTNQDCIIKNDRFLKFPKTKLKLNIGKLGFTEGKLKQVRVIPKYNEYVVELVIDVPYEQQMIEENARYMSIDLGIDNLATIVTNTGMKPVLVKGKHVKSINQYYNKMKSHFTSILRNGKQTNEGPFTSKRIEKLHQKRYLKIKDVFHKVSHHIVKLAQEEEVCKIVIGQNKGWKQEINMGKRNNQSFCHIPHNLLIQMITYKANAVGIQVVVTEESYTSKASFLDNDFIPTYGENDQNTTFSGKRIKRGIYRSANKTLIHADVNAAANILRKVIPNAWTNGIEGLGVKQLANVLTPLTLIVR

SEQ ID NO: 4554 - protein, 492 aa, unidentified
MNKMTKENPSNYKTLQIWIKKGHRMYSYFQECCHNAKNMYNTTNFYIRQVYTGLTQEKELQPLQKEVLDNIHKNIGKMNDIQLLAYQKKLEKEKLKPKEEQKEIKCNLFSEPNFEKPYVDYNFLDALFKAMIQNDYRALPTQCSQSIMKGLFQNWKSFFASLKDYKKNPNKYAGMPRIPKYIRSSEKEILYTNQDCIIKNGRFLKFPKTKLQLNIGKLGFTEGKLKQVRVIPKYNEYVVELVIDVPSEQQIIEENARYMSIDLGIDNLATIVTNTGMKPVLVKGKHVKSINQYYNKMKSHFTSILRNGKQTNEGPFTSKRIEKLHQKRYLKIKDVFHKVSHHIVKLAQEEEVCKIVIGQNKSWKQETNMGKRNNQSFCHIPHNFLIQMITYKANAVGIQVVVTEESYTSKASFLDNDFIPMYGENDQNTTFSGKRIERGIYRSANKTLINADVNAAANILRKVIPNAWTNGIEGLGVKQLANVLTPLTLIVR

SEQ ID NO: 4555 - protein, 413 aa, unidentified
MKLSFKFRPNIDPKQLEIIEELSYHTTKLYNIISYDLRENGFKNYYEIEKLYKNNWHCDFLHSHTRQQMFKILEQNWKSYFASIKDFAVNPSKYKGLPRPPKFKNTERNKNEIIFTNLAIRFQDGILKLSLSKSIQKLFEVDSLNFKVSNKLQSLINWNRLQQARFNYDKVQKCWYLIVIYNKNEVENSNDNVMSIDIGLDNLATITFKNGINQYVYCGKKLKSVNSYANKRIAYLQVIEMKKYGSDKFKDTKEINRLRKYRNNYINDYLHKVSKNIIDKAIKNNVGKIVIGKLKDIKQDMNYNKSFVQIPIQRLVELITYKAKLKGIEIKLQEESYTSGCSAIDLEPVTKKYYNKSRRITRGLFKSGYGILNADINGSLNILRKAEKCIPDLVNAMRDKGNWTHPQRIRIAC

SEQ ID NO: 4556 - protein, 399 aa, unidentified
MKRRQAFRFNVRPTDTQERIFRQFAGAFRFVHNRALALEIDRHASGKAHLGYVGTANLLPLWKRDPETVWLSGIHSQILRQSLKDLDRAYKNFFEKRAGFPKFRRKGEKDSFRFPQGARLDEPNARIWLPKIGWVRYRKSRTVLGTIKNVTVRRSGDRWFVSIQTEREIESPVHPNPGIVGIDLGVARFATLSDGTVIAPGRFLARHEARLKRLQRALSRKKKGSKNREKARKKLARLHRKMADARNDFLHKVSTTICKSHAVVVVEDLNVKGMSASAAGTVETPGRNVRQKSGLNRSLLDQGWSAFLRMLEYKADGSGGRVVRIPPQYTSQTCAVCGHVSPENRTTQALFRCVSCGHAENADLNAARNILRAGHARLACGTNTSSEVGAKASEPTEAA

SEQ ID NO: 4557 - protein, 399 aa, unidentified
MKRRQAFRFAVRPTDTPERIFRQFAGACRFVHNRALALEIDRHASGEARLGYVGTANLLPLWKRDPETVWLSGIHSQILRQSLKDLDRAYKNFFEKRAGFPKFRRKGEKDSFRFPQGARLDEPNARIWLPKIGWVRYRKSRTVLGTIKNVTVRRSGDKWFVSIQTEREIESPVHPNPGIVGIDLGLARFATLSDGTAIAPGRFFSRHEARLNRLQRALSRKKKGSKNREKVRKKLARLHRNMADARNDFLHKVSTTICKSHAVVVVEDLNVKGMSASAAGTVETPGRNVRQKSGLNRSLLDQGWSAFLRMLEYKADGSGGRVVRIPPQYTSQTCAVCGHVSPENRTTQALFRCVSCGHAENADLNAARNILRAGHARLACGTNTSSEVGAKASEPTEAA

SEQ ID NO: 4558 - protein, 399 aa, unidentified
MKRRQAFRFAVRPTDTQERIFRQFAGACRFVHNRALALEIDRHASGEARLGYVGTANLLPLWKRDPETVWLSGIHSQILQQSLKDLDRAYKNFFEKRAGFPKFRRKGENDSFRFPQGARLDEPNARIFLPKIGWVRYRKSRTVLGTIKNVTVRRSGDKWFVSIQTEREIESPVHPNPGIVGIDLGVARFATLSDGTVIAPGRFFSRHEARLKRLQRALSRKKKGSKNREKARKKLARLHRNMADARNDFLHKVSTTISKSHAVVVVEDLNVKGMSASAAGTVETPSRNVRQKSGLNRSLLDQGWSAFLRMLEYKADGSGGRVVRIPPQYTSQTCAVCGHVSPENRTTQALFRCVSCGHAENADLNAARNILRAGHARLACGTNTSPEVGAKAQEPTEAA

SEQ ID NO: 4559 - protein, 408 aa, unidentified
MSKLEVTRVLTINLTRKLTDEQRIILNHLTYSASKLWNVANYEIIQDNIKLSELEKKLKDNFWYKNLHSQSAQAVLQKLKVAWDNFFKQHTKRPRFQPKDGHFPVKWKKDGFKIIANKLRLSLSKQTRQYLKERHGIESKFLWVELSKALPLDAMQVKEVEIVPHDIYGERFYVLHLIYKKEVNPEMSKEDKVIMAIDLGVRNLATVVIEGEKQPLIFDGKILVSKLRWFAKETARIKSIIAEQGLKTCKRLARLTVKERNYVKDYVHKISSWIIDLAKRKGVSRIIIGELNKNITKIDIGDRVNQQLHRIPYGKLVKMIEYKAEELGIKVEQIDESYTSQKCSVCGVIKKSNRKYRGLYICSNCGAVINADVNGARNILFKVVPNPERGRDSGLGNPRRVSFKALLS

SEQ ID NO: 4560 - protein, 405 aa, unidentified
MEVTRVLTINLTRKLTKEQWIILNHLTYSASKLWNVANYQIIQGNVKLSELEKKLKDNFWYKNLHSQSAQAVLQKLKIAWINFFKQHAKRPRFQPKDGHFPVKWKKDGFRIIGNMLRLSLSKQTRNYLKERHGIESKYLWVGLPKALPLDAVQVKEVEIVPHDIYGERFYVLHLIYKKEVNPHKPKEEKVMAIDLGVRNLATVVVEGEKQPVIFDGRILLSKLRWFAKETARIKSIIAEQGLKSCKRLARLAVKERNYVKDYIHKISRWIVDLANNNGVSRIVIGDLSKSITKIDIGDRVNQQLHKIPFGKLINMIMYKAEELGIKVEQIDESYTSQKCSICGMIRKSNRKYRGLYVCSKCGTVINADVNGARNILFKVVPNPERGRDSGLGNPWRVRVLNPLLS

SEQ ID NO: 4561 - protein, 422 aa, unidentified
MLETTRTYRAKIGNHSQVSDDLDNCGHSASKLWNVARYHAQQEWDDTGEIPSEADLKRELKDHERYNDLHSQSSQRVLEELAESFNGWFKKRKNGDTDANPPGYRKRGDNHPRSTVTWKQNGIKHDSKHNKLRLSKGFNLKQHRSDFILVEYETRPDVTVENIQQVRVVWNGDQWELHLVCKVEIPVEDAPGDNTAGIDLGIKNYLAIAYDDGNAELYPGNVLKQDKHYFTRDEYDTEGENGPSQRALRARQKLSRRKDHFLHALAKHIVERCIDHKVGRIAIGDLSEIREDENGESRNWGKRGNKKLHGWEFDRFTTLLEYKAEEHGILVDRTSERDTSKTCSCCGRKRDANRVERGLYVCESCGVVMNADVNGAVNIRRKITQNPPTGDMSNGRLARPVAYLFNQTSGHFVPSEQVDCKP

SEQ ID NO: 4562 - protein, 424 aa, unidentified
MSRTVRTFEATITNQRQVRDDLDQLGWAASKLWNVGRYYTQEQWDETGEIPDDGELKSELKSHERYTDLHSQSSQRVLEELAEAFNGWFGKRRNGDERARPPGYRKNGNSHPRSTVTFKTAGFKHDAQFTRIRLSKGRNLKEHRSDFILCEYQTRPDIDLTEWDIQQVRAVYKRDEWRLQFVCRTTIDPDPPGDKVAGVDLGICNFAAVSFGGESLLYPGGALKEDEYYFAKKKAKCDDSSSREATRLDRKRTGRRAHFLHALSKSIVEECVERGVGTLVVGDLSGIREDDENGESRNWGDHGNLDLHGWAFDRFTTLLDYKAESEGIDVVLVSERDTSKSCSSCGHTDDNQRVERGLYVCEECDTVSNADVNGAENIRQKVLPNLATDGGDRDNGWLAQPTVHLFDRSGGRFAPREQAVNREP

SEQ ID NO: 4563 - protein, 479 aa, unidentified
MVHYKTMQIQVKKGHRLYSYYKEMCQNAKNLHNTTNFYIRQVFTGLTQDKGLQPLQQEVLQNIQTHLPKINDNQLAAYLKKVEKEKSKPVENRKEIKCNLFKEPSKEKPYVDYNFLDALFKSMIQRDYRSLPTQSSQGIIKSVFQNWKSFYASLREFKVNPGKFKARPKIPGYGRSFEKEVTFSNQDCVIKERKYLKFPKTKERLNIGKLGCVEGKLKQVRILPKYGHYVVELIFQVPSEHEMKVSKNRYMSVDLGIDNLATIVTNTGRRPVLVKGKNIKSINQRYNQLRAYYMGILRQGKNPKEGPFTSKRLEKINHKRFLKIKDLFHKASSQIERIILEEDIDTLIIGHNKDWKQHSNMGKKNNQSFVSIPHSLLIRMITYKAERHGIKVIVTEESYTSKASFLDVDAIPVYGVDDLKKSFSGKRIKRGVYRSKNGTLFNADVNGAGNIMRKVFKDAFQEPFLIGNSMSKPVSIVLK

SEQ ID NO: 4564 - protein, 422 aa, unidentified
MLETTRTYRATIVNHSQVSDDLDDCGHSASKLWNVARYHIQQEWNDTGEIPSEADLKRELKDHERYSDLHSQSSQRVLEELAESFTGWFKKRKNGDTDANPPGYRKRGDNHPRSTVTWKQHGIKHDTSNNRLRLSKGFNLKSHRSDFILCEYETRPDVTVENIQQVRAVWNGDRWELHLVCKVEIPVEDAPGDNAAGIDLGIKNYLAIAYDDGEAELYSGNVLKQDKHYFTRDEYDTEGENGPSRRALRARQKLSRRKDHFLHALSKHIVEQCIDHEVGRIAVGDLSDIREDENGDSRNWGTRRNKKLHGWEFDRFTRLLEYKAEEHGILVDRKSERDTSKTCSCCGRKREAKRVERGLYVCESCGVTMNADVNGAVNIRRKITQNPPTEDMSNGRLARPVAYLFTQTSGRFAPSEQAGCKP

SEQ ID NO: 4565 - protein, 655 aa, unidentified
MARGTRIFYASDIHGSERCFLKFLGAAKFYGARVLILGGDITGKVVVPLIHRGTGYEANFLGRMHRVESAEEIEALEKAIRFNGFYPVRLEPDEYEAISADELRQNELFRELVLASLRRWMELAEERLKGLGVRCFVNPGNDDESFVDEVLGESDYVENMDGGVARIDEEHEMVVVGYSNQTPFDSPREMPEEEAVHGDTQLFCFHCWQCFFRYYPQVRRNAKETGVIGLARPARKKKSSSDAPMQTLTAKAKVVDLSDQDALLLGLLGFVATKLWNVANHHRRSVWDETGKIPDFAQQCRELKANRWYKLLPSQSSQEILSELDDSYRSWFSLRKNADQKANPPGFRKKETLSTVTFKQKAFEMLPGHRIRLRLPKTYARREMVLEYRLPPDTALGKVQQVKLSLDPTSGDWYVHIAHRVPIEYCETGRIMSLDLGIANAVAGLVTDGFSFLVPGGELLAIDRYFQKEKAKCTKSTSNKCTRLNTKWGRQRTHYLHALTKWLVNLAEDHGVSTILVGELNGIRQDKDWGDAGNQKFHAWPFSKITNLLTYKAALAGIRVIQVSEKNTSTICPHCEKRAKTARVQRGLFLHCGQSFNADLVGAYNIVQRYLRETDQVLPDPSGVVGALARPAVNRFVWRKTTPKGREQGTFKQAA

SEQ ID NO: 4566 - protein, 489 aa, unidentified
MTKENPSNYKTLQIWIKKGHRMYSYFQECCHNAKNMYNTTNFYIRQVYTGLTQEKELQPLQKEVLANIHKNIGKMNDTQLLAYQKKLEKEKLKPKEEQKEITCNLFSEPNFEKPYVDYNFLDALFKAMIQNDYRALPTQCSQSIMKGVFQNWKSFFASLKDYKKNPNKYAGPPRIPKYIRSSEKEILYTNQDCIIKNDRFLKFPKTKLKLNIGKLGFTEGKLKQVRVIPKYNEYVVELVIDVPYEQQMIEENARYMSIDLGIDNLATIVTNTGMKPVLVKGKHVKSINQYYNKMKSHFTSVLRNGKQTNERPFTSKRIEKLHQKRYLKIKDVFHKVSHHIVKLAQEEEVCKIVIGQNKNWKQETNMGKRNNQSFCHIPHSLLIQMITYKANAVGIQVVVTEESYTSKASFLDNDFIPTYGENDQNTTFSGKRIKRGIYRSANKTLINADVNAAANILRKVIPNAWTNGIEGLGVKQLANVLTPLTLIVR

SEQ ID NO: 4567 - protein, 426 aa, unidentified
MIELARKKKSSNNAPMQTFTARAKVVNLSDRDALLLGLLGFVATKLWNVANHHRRIVWNETGKIPGFAEQCRELKNNRWYRLLPSQSSQEILGEQDDSYRSWFSHRKNGDKKAHPPGFRKKDTLSTVTFKQNAFEMLPDNRVRLKLPKTYGTREIVLEYQLPPDVTLGKVQQVKLVYEPRTGNWYLHITYRVSVKYKETGNVMALDLGIVNIVAGLISDGFSFIVPGGELLALDRYFQKEKARCTRSTSRRCIELNTRWGRQRNHYLHVLSRWLVNLAIAHNVSVILVGELKGIRADKDWGDAGNQKLHAWPFSKIISLLTYKAALAGIRVVKVPEKSTSTTCPVCGRRVKKARVHRGLFVHCGVALNADLVGAHNILQRYLREAGLALPDRSGVVGALARPAVNLFVWRKATPLGREQGTFRQAA

SEQ ID NO: 4568 - protein, 426 aa, unidentified
MAKQVVTRTYTASIRNQSRVSDDLDALGFAASKLWNVGRWTCSRIWGEIGHIPNHTELTAYLKTHERYDDLHSQSSQRVLQELAEAFNSWYGKRRNGDMRANPPGYRKHGDEHPRSTVTFKAAGFKLDTQYNRVRLSQGANLKNYWSDFILCTFHTRPDVDLSTVETVQQVKAVWTGDEWELRFVCKVEIEASESPGEKTVGVDLGIKNFAALAYEDGHSELYPLNCLKQDDYYFSKRIARCDDSNSEQVTRLNHKKSARRTHYFHTLSKHIVERCVEEGVGTIVVGNLSDIRVDEETNEAKNWGRHGNLDLHSWAFDRFRKLLTYKSETEDITVEQESERDTSKSCSCCGRKRDGNRVERGLYVCDTCGTVANADVNGAENIRQKVSLSSPNLSVNRSNGWLAQPSTFLFDKETGAFAPEERVRS

SEQ ID NO: 4569 - protein, 384 aa, unidentified
MEAQRQPPDCPDWWDEEVEMLAEEAWLPVAQDFCQRSGEPYSRCIHHLAGKSFVGLRNLTNHSLRGAMPVELLPENLDIDSSIKIELSPTPEERCQLRKMFGAFRFVYNKLVDLVGDDWRRLSQAQLRADYRPVRSVTRRNLLTDHLPDWVWDVPQKILDAAFTDFLKTITTTKAGDEAARNNGENRRPSELHFKTRKNNSTSIEIQVESFGYTGHASQARFLPNYFGWRRGSDEGIATKEDFPEPTHARIKRIVKDMHQKVAKWLSVNFDVVLLPKFPVSQLVRRRNRPDGRRRRINSVTARRMLTWSHYKFRQMLDYKMKRTGGVVVVCDEPWTTKTCSHCGRINHRITVQKTFWCPECNYVCDRDVNAARNIFLKNERLIP

SEQ ID NO: 4570 - protein, 489 aa, unidentified
MAKENPSNYKTLQIWIKKGHRMYSYFQECCHNAKNMYNTTNFYIRQVYTGLTQEKELQPLQKEVLANIHKNIGKMNDTQLLAYQKKLEKEKLKPKEEQKEITCNLFSEPNFEKPYVDYNFLDALFKAMIQNDYRALPTPCSQSIMKGVFQNWKSFFASLKDYKKNPNKYAGPPRIPKYIRSSEKEILYTNQDCIIKNDRFLKFPKTKLKLNIGKLGFTEGKLKQVRVIPKYNEYVVELVIDVPYEQQMIEENARYMSIDLGIDNLATIVTNTGMKPVLVKGKHVKSINQYYNKMKSHFTSILRNGKQTNEGPFTSKRIEKLHQKRYLKIKDVFHKVSHHIVKLAQEEEVCKIVIGQNKGWKQEINMGKRNNQSFCHIPHNLLIQMITYKANAVGIQVVVTEESYTSKASFLDNDFIPTYGENDQNTTFSGKRIKRGIYRSANKTLIHADVNAAANILRKVIPNAWTNGIEGLGVKQLANVLTPVTLIVR

SEQ ID NO: 4571 - protein, 428 aa, unidentified
MNMHRENAVSASSNVIDFSHRPKYIIAMQRLQAFKYELRPDGQQQLRMRRFAGSCRFVFNKALALQQERFEQGEKKLGYAELCKQLTQWKSEDSTAWLAETPSQPLQQTLKDLERAYTNFFAKRADFPRFKKKGLSDSFRYPQGFKLDQANSRLFLPKLGWLRYRNSRDALGVIKNITVSQSSGKWYAAIQTEREVDVPVHQGTAVGLDMGIKRFVTLSDGSHKDPLNSFKAHEKALRKAQQAMSRKVRFSRNWKKAKARIQRIQTHIGSARRDYLHKISTAISKNHALVCVEDLQVRNMSKSAAGTTDTPGRNVRAKSGLNKAILDQGWGEFRRQLDYKLAWNGGHLIAVPPKNTSRTCPCCGHISADNRQTQATFECVECGFKENADLVGAINVLRAGHAQLACEVSGAIRPPAAGTHRSELGVIA

SEQ ID NO: 4572 - protein, 488 aa, unidentified
MTKENPSNYKTLQIWIKKGHRMYSYFQECCHNAKNMYNTTNFYIRQVYTGLTQEKELQPLQKEVLDNIHKNIGKMNDTQLLAYQKKLEKENLKPKEEQKEIKCNLFSEPNFEKPYVDYNFLDALFKAMIQNDYRALPTQCSQSIMKGLFQNWKSFFASLKDYKKNPNKYAGMPRIPKYIRSSEKEILYTNQDCIIKNGRFLKFPKTKLQLNIGKLGFTEGKLKQVRVIPKYNEYVVELVIDVPSEQQMIEENARYMSIDLGIDNLATIVTNTGMKPVLVKGKHVKSINQYYNKMRSHFTSILRNGKQTNKGPFTSKRIEKLHQKRYLKIKDVFHKVSHHIVKLAQEEVCKIVIGQNKSWKQETNMGKRNNQSFCYIPHNLLIQMITYKANAVGIQVVVTEESYTSKASFLDNDFIPTYGENDQNTTFSGKRIERGIYRSANKTLINADVNAAANILRKVIPNAWTNGIEGLGVKQLANVLTPLTLIIR

SEQ ID NO: 4573 - protein, 489 aa, unidentified
MTKENPSNYKTLQIWIKKGHRMYSYFQECCHNAKNMYNTTNFYIRQVYTGLTQEKELQPLQKEVLDNIHKNIGKMNDTQLLAYQKKLEKEKLKPKEEQKEITCNLFSEPNFEKPYVDYNFLDALFKAMIQNDYRALPTQCSQSIMKGLFQNWKSFFASLKDYKKNPNKYAGMPRIPKYIRSSEKEILYTNQDCIIKNGRFLKFPKTKLQLNIGKIGFTKGKLKQVRVIPKYNEYVVELVIDVPSEQQMIEENARYMSIDLGIDNLATIVTNTGMKPVLVKGKHVKSINQYYNKMKSHFTSILRNGKQTNEGPFTSKRIEKLHQKRYLKIKDVFHKVSHHIVKLAQEEDVCKIVIGQNKSWKQETNMGKRNNQSFCHIPHNLLIQMITYKANAVGIHVVVTEESYTSKASFLDNDFIPTYGENDQNTTFSGKRIKRGIYRSANKTLINADVNAAANILRKVIPNAWTNGIEGLGVKQLANVLTPLTLIVR

SEQ ID NO: 4574 - protein, 489 aa, unidentified
MTKENPSNYKTLQIWIKKGHRMYSYFQECCHNAKNMYNTTNFYIRQVYTGLTQEKELQPLQKEVLDNIHKNIGKMNDTQLLAYQKKLEKENLKPKEEQKEIKCNLFSEPNFEKPYVDYNFLDALFKAMIQNDYRALPTQCSQSIMKCLFQNWKSFFASLKDYKKNPNKYAGMPRIPKYIRSSEKEILYTNQDCIIKNGRFLKFPKTKLQLNIGKLGFTEGKLKQVRVIPKYNEYVVELVIDVPSEQQMIEENARYMSIDLGIDNLATIVTNTGMKPVLVKGKHVKSINQYYNKMRSHFTSILRNGKQTNKGPFTSKRIEKLHQKRYLKIKDVFHKVSHHIVKLAQEEEVCKIVIGQNKSWKQETNMGKRNNQSFCYIPHNLLIQMITYKANAVGIQVVVTEESYTSKASFLDNDFIPTYGENDQNTTFSGKRIERGIYRSANKTLINADVNAAANILRKVIPNAWTNGIEGLGVKQLANVLTPLTLIIR

SEQ ID NO: 4575 - protein, 479 aa, unidentified
MEKHYKTYQIWIKNGHRMHSNFKTSCKLAKNIYNTTNFYYRQVYTALTQIKELQPLQKEVLSTIQDNIGKMNDVQLHAYQKKREIEKLKPVETRKDVKCNLFKTPTKENPYVDYNFLDALFKVIVQNDYRSLPVQSSQGVMKTVFQNWKSFFESLKEYKINPTKFKGRPRIPGYNRSQEREVLFTNQDCVVKNNKYLKFPKTKEQLNIGKLGVVNGKIKQVRVIPKYGQYVVELVVDVPQSKEEMMLNERYMSIDIGIDNLATIVTNTGRRPILVKGKNVKSINQYYNKMKAHYLGILLKGKKTKEGPFTSNRLEKLYQNRSLKLKDIFHKASYHIVKTAVEECASVIIVGQNKDWKQEVNIGKKNNQSFVHIPHSMLISMITYKAEEYGIRVIVTEESYTSKASFLDGDNVPVYEKGKKHSFSGKRMKRGLYRSKEGVLLNADVNGASNIMKKAILRMLEKKITINSVQLFHPQTLIV

SEQ ID NO: 4576 - protein, 422 aa, unidentified
MLETTRTYRAKIVNHQQVSDDLDDCGHSASKLWNVARYHAQQEWDNTGEIPSEADLKRELKDHERYSDLHSQSSQRVLEELAESFNGWFKKRKNGDTDANPPGYRKRGDNHPRSTVTWKQNGIKHDSKHNQLRLSKGFNLKNHRSDFILAEYETRPDVTVENIQQVRAVWNGDCWELHLVCKVEVPVEDAPGDNTAGIDLGIKNYLAIAYDDGDAELYPGNVLKQDKHYFTRDEYDTEGENGPSRRALRARQKLSRRKDHFLHALAKHIVEQCIDHEVGRIAIGDLSKIREDENGDARNWGKRGNKKLHGWEFDRFTTLLEYKAEEHGILVDRVSERDTSKTCSCCGRKRDANRVERGLYVCESCGVAMNADVNGAVNIRRKITQNPPTEDMSNGRLARPAVHLFNQTSGRFAPSEQVSCEP

SEQ ID NO: 4577 - protein, 402 aa, unidentified
MKRLQAFKFQLRPGGQQEREMRRFAGACRFVFNRALALQNENHEAGNKYIPYGKMASWLVEWKNATETQWLKDAPSQPLQQSLKDLERAYKNFFRKRAAFPRFKKRGQNDAFRYPQGVKLDQENSRIFLPKLGWMRYRNSRQVTGVVKNVTASQSCGKWYISIQTESEVSTPVHPSALMVGLDAGVAKLATLSDGTVFGPVNSFQKNQKKLARLQRQLSRKVKFSNNWQKQKRKIQRLHSCIANICRDYLHKVTTTVSKNHAMIVIEDLKVSNMSKSAAGTVSQPGRNVRAKSGLNRSILDQGWYEMRRQLEYKQLWRGGQVLAVPPAYTSQRCACCGHTAKENRLSQSKFRCQACGYTANADVNGARNILAAGHAVLACGEMVQSGRPLKQEPTEMIQATA

SEQ ID NO: 4578 - protein, 417 aa, unidentified
MAKRSVTRTHVASIRNQQQVRDGLDSLGFAASKLWNVARWTIGRIWDETGTIPGEGALKSYLKNHERYADLNAQSSQAVLEELSEAFKSWYGHRRNGNKNANPPGYRKHGDDHPRSTVTFKEDGFKHDSKNGRIRLSKGRNLKAHWSDFLLCEYETRPDAEIENVQLVRAVYEHGEWRLHIVCRHEVEFRSSGDRTAGIDLGICNFATVSYGDEATLYPGGALKEDIYYFAKERAKCAHSASREARRLDRKQTERRTHFLHALSKHIVSACKQRSVGTIVVGDLGGIRDDENGDARNWGDHGNLDLHGWAFDRFTSMLEYKAEDEGIEVVRKSERDTSKTCSSCGTKDGNQRIERGLYVCDDCGTVANADVNGAENIRRKVLPNLATDGGRDRDNGWMAQPAVHLFDRSEGSFAPRE

SEQ ID NO: 4579 - protein, 422 aa, unidentified
MLETTRTYRAKIVNHSQVSDDLDDCGHSASKLWNVARYHTQQEWDETGEIPSEADLKRELKDHERYSDLHSQSSQRVLEELAESFNGWFKKRKNGDTDANPPGYRKRGDNHPRSTVTWKQNGIKHDSKHNKLRLSKGFNLKQHRSDFILAEYETRPDVTVKNIQQVRAVWNGDRWELHLVCNVEIPVENAPGDNTAGIDLGIKNYLAIAYDDGDAELYPGNVLKQDKHYFTRDEYDTEGENGPSRRALRARQKLSRRKDHFLHALAKHVVEKCIDHEVGRIAIGDLSKIREDENGDARNWGKRGNKKLHGWEFDRFTRLLEYKAEEHGILVDRTSERDTSKTCSCCGRKRDANRMERGLYVCDSCGVTMNADVNGAVNIRRKITQNPPTGDMSNGRLARPVAYLFNQTSGRFAPSEQAGCKP

SEQ ID NO: 4580 - protein, 422 aa, unidentified
MLETTRTYRAKIVNHTQVSDDLDECGHSASKLWNVARYHTQQEWDDTGEIPSEDDLKRELKDHERYSDLHSQSSQRVLEELAEAFNGWFKKRKNGDTDANPPGYRKRGDTHPRSTVTWKQMGIKHDSKHSQLRLSKGFNLKQHRSDFILAEYETRPDVTVENIQQVRAVWNGNRWELHLVCNVKIAVEDAPGDNTAGIDLGISNYLAIAYDDGNAALYPGNVLKQDKHYYTRDEYDTEGENGPSRRALRTRQKLSRRKDHFLHSLTKHIVERCIDHGIGRIAIGDLREIRADANGDSRNWGRSGNKKLHGWEFDRFTSLLEYKAEEHGILVDRKDERDTSKTCSCCGRKRDANRVERGLYVCKSCGATMNADVNGAVNIRRKITQNPPTEDMSNGRLARPVAYLFNQTSGRFAPSEQAGCEP

SEQ ID NO: 4581 - protein, 424 aa, unidentified
MSRTVRTFEATITNQQLVRDDLDQLGWAASKLWNVGRYYAQQQWDETGEIPDDGELKTELKDHERYTDLHSQSSQRVLEELAEAFNGWFGKRRSGDDRARPPGYRKNGDSHPRSTVSFKAAGFKHDAQFARVRLSKGRNLKEHRSDFILCEYQTRPDVDLTEWDIQQVRAVYKHDEWRLQFVCRTTIDPEPPGDEVAGVDLGICNFAAVSFGGESVLYPGGALKEDEYYFAKKRAETDDSASREAKRLDRKRTGRRTHFLHSLSKAIVEECVERGVGTLVVGDLGGIREDDENGEPRDRGDHGNLYLHGWAFDRFTTLLDYKAEAQGIDVALVSERDTSKSCSACGHTNDDQRVERGLYVCEACDTVANADVNGAENIRQKVLPSLATDGGDRDNGWLAQPAVHLFDRSEGCFAPQEQVANREP

SEQ ID NO: 4582 - protein, 422 aa, unidentified
MLETTRTYRAKIVNHSQVSDDLDDCGHSASKLWNVARYHIQQEWDDTGEIPSEADLKRELKDHERYSDLHSQSSQRVLEELAESFTGWFKKRKNGDTDANLPGYRKRGDNHPRSTVTWKQMGIKHDSKHNQLRLSKGFNLKNHRSDFILAEYETRPDVTVENIQQVRAVWNGDRWELHLVCKVEIPVEDAPGDNTAGIDLGIKNYLAIAYDDGDAELYPGNVLKQDKHYFTRDEYDTEGENGPSRRALRARQKLSRRKDHFLHALAKHIVEQCIDHEVGRIAIGDLSKIREDENGDARNWGKRGNKKLHGWEFDRFTTLLGYKAEEHGILVDRVSERDTSKTCSCCGRKRDANRVERGLYVCGSCGVTMNADVNGAVNIRRKITQSPPTEDMSNGRLARPVAYLFNQTSGRFAPSEQVSCEP

SEQ ID NO: 4583 - protein, 422 aa, unidentified
MLKTTRTYRAKIVNHQQVSDDLDNCGHSASKLWNVARYHIQQEWDSTGEIPSEADLKRELKDHERYSDLHSQSSQRVLEELAESFNGWFKKRKNGDTDANPPGYRKRGDKHPRSTVTWKQNGIKHDSKHNQLRLSKGFNLKNHRSDFILAGYETRPDVTVENIQQVRAVWNGDRWELHLVCKVEIPVEEAPGDDTAGIDLGISNYLTIAYDDGDAELYPGNVLKQDKHYFTRDEYDTEGENGPSRRALRARQKLSRRKDHFLHALAKHIVEQCIDHEVGRIAIGDLSDIRDDENGESRNWGRGGNKKLHGWEFDRFTTLLEYKAEEHGILVDRTSERDTSKTCSCCGRKRDANRVERGLYVCESCGATMNADVNGAVNIRRKITQNPPTEDMSNGRLARPVAYLFNQTSGRFAPIEQVGCES

SEQ ID NO: 4584 - protein, 422 aa, unidentified
MLETTRTYRAKIVNHQQVSDDLDDCGHSASKLWNVARYHAQQEWDNTGEIPSEADLKRELKDHERYSDLHSQSSQRVLEELAESFNGWFKKRKNGDTDANPPGYRKRGDNHPRSTVTWKQNGIKHDSKHNQLRLSKGFNLKNHRSDFILAEYETRPDVTVENIQQVRAVWNGDCWELHLVCKVEVPVEDAPGDNTAGIDLGIKNYLAIAYDDGDAELYPGNVLKQDKHYFTRDEYDTEGENGPSRRALRARQKLSRRKDHFLHALAKHIVEQCIDHEVGRIAIGDLSKIREDENGDARNWGKRGNKKLHGWEFDRFTTLLEYKAEEHGILVDRVSERDTSKTCSCCGRKRDANRVERGLYVCESCGVAMNADVIGAVNIRRKITQNPPTEDMSNGRLARPAVHLFNQTSGRFAPSEQVSCEP

SEQ ID NO: 4585 - protein, 422 aa, unidentified
MLETTRTYRAKIVNHSQVSDDLDDCGHSASKLWNVARYHAQNEWDDTGEIPSEADLKCELKDHERYSDLHSQSSQRVLEELAESFNGWFKKRKNGDTDANPPGYRKRGGNHPRSTVTWKQNGIKHDSKHNQLRLSKGFNLKNHRSDFILAEYETRPDVTVENIQQVRAVWNGDRWELHLVCKVEIPVEDAPGDNTAGIDLGISNYLAIAYDDGDAELYPGNVLKQDKHYFTRDEYDTEGKNGPSRRALRARQKLSRRKDHFLHALAKHIVEQCIDHEVGRIAIGDLSDIREDENGESRNWGKRGNKKIHGWEFDRFTTLLEYKAEEHGILVDRVSERATSKTCSCCGRKRDANRVERGLYVCESCGTTMNADVNGAVNIRRKITQNPPTEDMSNGRLARPAVHLFNQTSGRFAPSKQVSCEP

SEQ ID NO: 4586 - protein, 459 aa, unidentified
MLKTTRTYRAKIVNHQQVSDDLDNCGHSASKLWNVARYHIQQEWDSTGEIPSEADLKRELKDHERYSDLHSQSSQRVLEELAESFNGWFKKRKNGDTDANPPGYRKRGDKHPRSTVTWKQNGIKHDSKHNQLRLSKGFNLKNHRSDFILAGYETRPDVTVEKIQQVRAVWNGDRWELHLVCKVEIPVEDAPGDDTAGIDLGISNYLTIAYDDGDAELYPGNVLKQDKHYFTRDEYDTEGENGPSRRALRARQKLSRRKDHFLHALAKHIVEQCIGHEVGRIAVGDLSKIRVDENGESRNWGRGGNKKLHGWEFDRFTTLLEYKAEEHGILVDRTSERDTSKTCSCCGRKRDANRVERGLYVCESCGATMNADVNGAVNIRRKITQNPPTEDMSNGRLARPAVHLFNQTSGRFAPSEQVSCEPSFGTASSPPVQPNLGAFRTERTGELRTLISQRSGFPR

SEQ ID NO: 4587 - protein, 452 aa, unidentified
MANRTVIRTHRASIRNQRQVRDGLDTLGFAAAKLWNVARYTVGRVWDACGQIPDDSVLKSYLKSHERYADLNAQSSQXCGQIPDDSVLKSYLKSHERYADLNAQSSQATLEELAEAFKGWYGHRRNGNTKANPPGYRKNGDDHPRSTVTFKEDGFKHDARNGYIRLSKGRNTKAHWSDFILCAYDADPDIAIENVQQVRAVYEHGEWRLHIVCHHEVEVEPPGDGTAGVDLGICNVAAVSFGDESLLYPGGSLKEDDYYFAKKRAKCDDSFSREARRLDRKRTDRRAHFLHALSKHIVAECVEREVGTLVVGDLGGIREDENGPRDWGDHGNLDLHGWAFDRFTTMLDYKAEAEGIEVEPVPERDTSKSCSVCGRCDDSQRVERGLYVCDDCGLVANADTNGAENIRQKVLPNLATDGDDRDNGWMAQPAVRLFDRREGVFAPREQVVDHEP

SEQ ID NO: 4588 - protein, 366 aa, unidentified
MATETLGTRKRTRPATAXQRVLAELGEAFSGWFGHRNSGNEKANPPGYRKNGDEHPRSTVTFKQAGFKHDAKNQRIRLSKGRNLKAHRSDFVLCEYDVIGPEGTTVENVQQVRAVYEHGVWRLHIVCRVEVEVAEPPGDRTAGVDLGICNVAAVSFGDESLLYPGGSLKEDEYYFGKKRAETDDSASREARRLDQKHTDRRTHFFHTLSKEIVEQCAERGVGTIFVGDLGGIRDDENGNPKNWGKHGNLDLHGWAFDRFTTMLEYKAEMQGIAVETVSERDTSKTCSVCGTKADSQRVERGLYVCDECGTVANADTNGAENIRQKSTSESSVDEDRSNGWLAQPVVRLFDKTRGSFLPSEQATHEP

SEQ ID NO: 4589 - protein, 309 aa, unidentified
MNASKLWNVARWTAGRVWXVSDGLHESFALVNASKLWNVARWTAGRVWDACGQIPDDGVLKSYLKGSGRYVDLHSQSSQRVLEELAEAFTGWYGHRNNGNQKAXXRSTVTFKQAGFKHDTENQRIRLSKGRNLKDHRSDFVLCEYDVIGPRGTTVENVQQVRAVHEHGIWRLHIVCNVEIDVPDAPGNGVAGIDLGICNVAAVVCNVEIDVPDAPGNGVAGIDLGICNVAAVSFGDESLLYPGGALKEDDYYFAKKRAECDECSSREARRLDQKRTDRRTHFLHALSKHIVQQCVERGVGTIVVGDLGG

SEQ ID NO: 4590 - protein, 424 aa, unidentified
MAKSTVTRTYRARVRNHSQVRDDLDSLGFAASKLWNVARYTVGRVWDACGQIPSTFDLQKYLKGHERYADLHSQSSQRVLAELGEAFTAWYGHRGNGNTKANPPGYRKNGDEHPRSTVTFKQKGFKHDAENDRIRLSKGSNLKDGWGDFILCEYDVIGPRGTTVENVQQVRAVYEHSVWRLHIVCKVPVEVAEPPGDRTAGVDLGICNVAAVSFGDESLLYPGGSLKEDDYYFAKERAKCDDSFSREARRLDQKRTDRRTHFFHTLSKEIVERCAERGVGTVFVGDLGGVREDENGEPVDWGKHGNLDLHGWAFDRFTTMLTYKAEMQGIAVETVSERDTSKTCSVCGTKADSQRVERGLYVCDECGLIANADTNGAENIRQKSTSESINAVDRSNGWLAQPVVRLFDKTRGGFLPREQATREP

SEQ ID NO: 4591 - protein, 422 aa, unidentified
MANRTAKRTYRARIQNHSQVRDDLDSLGFAASKLWNVGRWTAQRVWDACGQIPSGFDLQAYLKGSERYVDLHSQSSQRVLAELDEAFTGWFGHRDNGNQKANPPGYRKHNDEHPRSTVTFKQAGFKHDEKNQRIRLSKGRNLKEHRSDFVLCEYDVIGPEGTTVKNVQQVRAVHEHGVWRLHIVCRVEVEVAESPGDRTAGVDLGICNVAAVSFGDESLLYPGGSLKEDDYYFAKKRAECDDSFSREARRLDQKRTDRRTHFFHTLSKEIVEQCAERGVGTVYVGDLGGIRDDENGNPKNWGKHGNLDLHGWAFDRFTTMLEYKAEMQGIAVETVSERDTSKTCSVCGTKADSQRVERGLYDCDECGTVANADTNGAENIRRKSTSESIEDRSNGWLAQPAVRLFDKTRGVFLPPERTTREP

SEQ ID NO: 4592 - protein, 489 aa, unidentified
MTKENPSNYKTLQIWIKKGHRMYSYFQECCHNAKNMYNTTNFYIRQVYTGLTQEKELQPLQKEVLDNIHKNIGKMNDIQLLAYQKKLEKEKLKPKEEQKEIKCNLFSEPNFEKPYVDYNFLDALFKAMIQNDYRALPTQCSQSIMKGLFQNWKSFFASLKDYKKNPNKYAGMPRIPKYIRSSEKEILYTNQDCIIKNGRFLKFPKTKLQLNIGKLGFTEGKLKQVRVIPKYNEYVVELVIDVPSEQQIIEENARYMSIDLGIDNLATIVTNTGMKPVLVKGKHVKSINQYYNKMKSHFTSILRNGKQTNEGPFTSKRIEKLHQKRYLKIKDVFHKVSHHIVKLAQEEEVCKIVIGQNKSWKQETNMGKRNNQSFCHIPHNFLIQMITYKANAVGIQVVVTEESYTSKASFLDNDFIPMYGENDQNTTFSGKRIERGIYRSANKTLINADVNAAANILRKVIPNAWTNGIEGLGVKQLANVLTPLTLIVR

SEQ ID NO: 4593 - protein, 489 aa, unidentified
MTKENSSNYKTLQIWIKKGHRMYSYFQECCHNAKNMYNTTNFYIRQVYTGLTQEKELQPLQKEVLDHIHKNIGKMNDTQLLAYQKRLEKEKLKPKEEQKEITCNLFSEPNFEKPYVDYNFLDALFKAMIQNDYRALPTQCSQSIMKGLFQNWKSFFASLKDYKKNPNKYAGMPRIPKYIRSSEKEMLYTNQDCIIKNSRFLKFPKTKLQLNIGKLGFTEGKLKQVRVIPKYNEYVVELVIDVPSEQQMIEENARYMSIDLGIDNLATIVTNTGMKPVLVKGKHVKSINQYYNKMKSHFTSVLRNGKQTNEGPFTSKRIEKLHQKRYLKIKDVFHKVSHHIVKLAQEEEVCKIVIGQNKSWKQETNMGKRNNQSFCHIPHSLLIQMITYKANAVGIQVVVTEESYTSKASFLDNDFIPTYGENDQKTIFSGKRIKRGIYRSANKTLIHADVNAAANILRKVIPNAWTNGIEGLGVKQLANVLTPLTLIVR

SEQ ID NO: 4594 - protein, 489 aa, unidentified
MAKENPSNYKTLQIWIKKGHRMYSYFQECCHNAKNMYNTTNFYIRQVYTGLTQEKELQPLQKEVLANIHKNIGKMNDTQLLAYQKKLEKEKLKPKEEQKEITCNLFSEPNFEKPYVDYNFLDALFKAMIQNDYRALPTPCSQSIMKGVFQNWKSFFASLKDYKKNPNKYAGPPRIPKYIRSSEKEILYTNQDCIIKNDRFLKFPKTKLKLNIGKLGFTEGKLKQVRVIPKYNEYVVELVIDVPYEQQMIEENARYMSIDLGIDNLATIVTNTGMKPVLVKGKHVKSINQYYNKMKSHFTSILRNGKQTNEGPFTSKRIEKLHQKRYLKIKDVFHKVSHHIVKLAQEEEVCKIVIGQNKGWKQEINMGKRNNQSFCHIPHNLLIQMITYKANAVGIQVVVTEESYTSKASFLDNDFIPTYGENDQNTTFSGKRIKRGIYRSANKTLIHADVNAAANILRKVIPNAWTNGIEGLGVKQLANVLTPLTLIVR

SEQ ID NO: 4595 - protein, 488 aa, unidentified
MAKENPSNYKTLQIWIKKGHRMYSYFQECCHNAKNMYNTTNFYIRQVYTGLTQEKELQPLQKEVLANIHKNIGKMNDTQLLAYQKKLEKEKLKPKEEQKEITCNLFSEPNFEKPYVDYNFLDALFKAMIQNDYRSLPTQCSQSIMKGVFQNWKSFFASLKDYKKNPNKYAGPPRIPKYIRSSEKEILYTNQDCIIKNDRFLKFPKTKLKLNIGKLGFTEGKLKQVRVIPKYNEYVVELVIDVPYEQQMIEENARYMSIDLGIDNLATIVTNTGMKPVLVKGKHVKSINQYYNKMKSHFTSILRNGKQTNEGPFTSKRIEKLHQKRYLKIKDVFHKVSHHIVKLAQEEVCKIVIGQNKGWKQETNMGKRNNQSFCHIPHNLLIQMITYKANAVGIQVVVTEESYTSKASFLDNDFIPTYGENDQNTTFSGKRIKRGIYRSANKTLIHADVNAAANILRKVIPNAWTNGIEGLGVKQLANVLTPLTLIVR

SEQ ID NO: 4596 - protein, 402 aa, unidentified
MKRLQAFKFQLRPNGQQERDMRRFAGACRFVFNRALALQNENHEAGNKYIPYTKMASWLIEWKSHPDTQWLKDAPSQPLQQSLKDLERGYKNFFQKRAAFPRFKKRGQNDAFRYPQGVKLDQANNRISLPKLGWVRYRNSREVIGEVKNVTVSLSCDKWYVSIQTEYEVADPVHNAESMVGLDAGVTKLATLSDGTVYHPVNSFKANQRKLAMLQRQLSRKEKFSANWQKQKRKIQRHHSHIANIRRDYLHKVTSEISKNHAMIVIEDLKVSNMSKSAKGTSEQHGRNVRAKSGLNRSILDQGWYEMRRQLEYKQLWRGGQVLAIPPAYTSQRCACCGHTAKENRLSQSRFECLECGYTENADVNGARNILAAGHAVLACGGMVQSGHPLKQEPTEASQAPV

SEQ ID NO: 4597 - protein, 489 aa, unidentified
MTKENPSNYKTLQIWIKKGHRMYSYFQECCHNAKNMYNTTNFYIRQVYTGLTQEKELQPLQKEVLDHIHKNIGKMNDTQRLAYQKKLEKEKLKPKEEQKEITCNLFSEPNFEKPYVDYNFLDALFKAMIQNDYRALPTQCSQSIMKGLFQNWKSFFASLKDYKKNPNKYAGPPRIPKYIRSSEKEILYTNQDCIIKNDRFLKFPKTKLQLNIGKLGFTEGKLKQVRVIPKYNEYVVELVIDVPSEQQMIEENARYMSIDLGIDNLATIVTNTGMKPVLVKGKHVKSINQYYNKMKSHFTSVLRNGKQTNEGPFTSKRIEKLHQKRYLKIKDVFHKVSHHIVKLAQEEEVCKIVIGQNKSWKQETNMGKRNNQTFCHIPHSLLIQMITYKANAVGIQVVVTEESYTSKASFLDNDFIPTYGENDQNTTFSGKRIERGIYRSANKTLINADVNAAANILRKVIPNAWTNGIEGLGVKQLANVLTPLTLIVR

SEQ ID NO: 4598 - protein, 489 aa, unidentified
MAKENPSNYKTLQIWIKKGHRMYSYFQECCHNAKNMYNTTNFYIRQVYTGLTQEKELQPLQKEVLANIHKNIGKMNDTQLLAYQKKLEKEKLKPKEEQKEITCNLFSEPNFEKPYVDYNFLDALFKAMIQNDYRTLPTQCSQSIMKGLFQNWKSFFASLKDYKKNPNKYAGTPRIPKYIRSSEKEILYTNQDCIIKNGRFLKFPKTKLQLNIGKLGFTEGKLKQVRVIPKYNEYVVELVIDVPSEQQMIEENARYMSIDLGIDNLATIVTNTGMKPVLVKGKHVKSINQYYNKMKSHFTSILRNGKQTNEGPFTSKRIEKLHQKRYLKIKDVFHKVSHHIVKLAQEEEVCKIVIGQNKSWKQETNMGKRNNQSFCHIPHSLLIQMITYKANAVGIQVVVTEESYTSKASFLDNDFIPTYGENDQNTTFSGKRIKRGIYRSANKTLIHADVNAAANILRKVIPNAWTNGIEGLGVKQLANVLTPLTLIVR

SEQ ID NO: 4599 - protein, 489 aa, unidentified
MAKENPSNYKTLQIWIKKGHRMYSYFQEYCHNAKNMYNTTNFYIRQVYTGLTQEKELQPLQKEVLANIHKNIGKMNDTQLLAYQKKLEKEKLKPKEEQKEITCNLFSEPNFEKPYVDYNFLDALFKAMIQNDYRALPTQCSQSIMKGVFQNWKSFFASLKDYKKNPNKYAGMPRIPKYIRSSEKEILYTNQDCIIKNSRFLKFPKTKLQLNIGKLGFTEGKLKQVRVIPKYNEYVVELVIDVPSEQQMIEENARYMSIDLGIDNLATIVTNTGMKPVLVKGKHVKSINQYYNKMKSHFTSVLRNGKQTNERPFTSKRIEKLHQKRYLKIKDVFHKVSHHIVKLAQEEEVCKIVIGQNKNWKQETNMGKRNNQSFCHIPHSLLIQMITYKANAVGIQVVVTEESYTSKASFLDNDFIPTYGENDQNTTFSGKRIKRGIYRSANKTLINADVNAAANILRKVIPNAWTNGIEGLGVKQLANVLTPLTLIVR

SEQ ID NO: 4600 - protein, 489 aa, unidentified
MAKENPSNYKTLQIWIKKGHRMYSYFQECCHNAKNMYNTTNFYIRQVYTGLTQEKELQPLQKEVLANIHKNIGKMNDTQLLAYQKKLEKEKLKPKEEQKEITCNLFSEPNFEKPYVDYNFLDALFKAMIQNDYRALPTQCSQSIMKGVFQNWKSFFASLKDYKKNPNKYAGMPRIPKYIRSSEKEILYTNQDCIIKNSRFLKFPKTKLQLNIGKLGFTEGKLKQVRVIPKYNEYVVELVIDVPSEQQMIEENARYMSIDLGIDNLATIVTNTGMKPVLVKGKHVKSINQYYNKMKSHFTSVLRNGKQTNERPFTSKRIEKLHQKRYLKIKDVFHKVSHHIVKLAQEEEVCKIVIGQNKNWKQETNMGKRNNQSFCHIPHSLLIQMITYKANAVGIQVVVTEESYTSKASFLDNDFIPTYGENDQNTTFSGKRIKRGIYRSANKTLIHADVNAAANILRKVIPNAWTNGIEGLGVKQLANVLTPLTLIVR

SEQ ID NO: 4601 - protein, 489 aa, unidentified
MAKENPSNYKTLQIWIKKGHRMYSYFQECCHNAKNMYNTTNFYIRQVYTGLTQEKELQPLQKEVLANIHKNIGKMNDTQLLAYQKKLEKEKLKPKEEQKEITCNLFSEPNFEKPYVDYNFLDALFKAMIQNDYRTLPTQCSQSIMKGLFQNWKSFFASLKDYKKNPNKYAGTPRIPKYIRSSEKEILYTNQDCIIKNGRFLKFPKTKLQLNIGKLGFTEGKLKQVRVIPKYNEYVVELVIDVPSEQQMIEENARYMSIDLGIDNLATIVTNTGMKPVLVKGKHVKSINQYYNKMKSHFTSVLRNGKQTNERPFTSKRIEKLHQKRYLKIKDVFHKVSHHIVKLAQEEEVCKIVIGQNKNWKQETNMGKRNNQSFCHIPHSLLIQMITYKANAVGIQVVVTEESYTSKASFLDNDFIPTYGENDQNTTFSGKRIKRGIYRSANKTLIHADVNAAANILRKVIQNAWTNGIEGLGVKQLANVLTPLTLIVR

SEQ ID NO: 4602 - protein, 406 aa, unidentified
MVKLGRTIKLRLYPDVNQAEQFLAMSKEYQRLANIVSQWIFDHGFQLSWLKINHHLYKIFRQESELNSQMIQSVFRTVVARYKTVREQVRQHSYRYKNAESKWIQVPRDLTWLVKPIQFRRPQADLVRQSNYSFLDKMQKISMTTLGKRTKLSFTDKGFEKYFTDGWKLGTAKLVHNRGKWFLHIGITKEVSDFNVKDNPKIVGIDRGLRFLATAFDSEGKTLFFDGQKVLRKRKIFLEIRRQLQSKGTRSAKKKLKQLAQRENRWMTDVNHRLTKTLVTAYGSHTLFVLEDLTNVTFNTADFPKSLRNSHRSWPFFQLESFLMYKAQAIQSTVVKVSPAFTSQRCPRCGLVEKTNRHHDTHEYWCKQCQYRCNDDRLGAMNIEMLGQEWLSGVKRPKIKKLTTTG

SEQ ID NO: 4603 - protein, 413 aa, unidentified
MKLSFKFRLNINPTQLEIIEELSYHTTKLYNIISYDLRKNGFKNYYEIEKLYKNNWHCDFLHSHTRQQMFKILEQNWKSYFASIKDFGVNPSKYKGSPRPPKFKNTERNKNEIIFTNLAIRFQDGILKLSLSKSIQKLFKVDSLNFEVSNKLQSLINWNRLQQARFNYDKVQKCWYLIVIYNKDEVENSNDNVMSIDIGLDNLATITFKNGINQYVYCGKKLKSVNSYANKRIAYLQAIEMKKYGSDKFKNTKEINRLRKYRNNYINDYLHKVSKNIIDKAIKNNVGKIVIGKLKDIKQDMNYNKSFVQIPIQRLVELITYKAKLKGIEIKLQEESYTSGCSAIDLEPVTKKYYNKSRRITRGLFKSGYGILNADINGSLNILRKSEKCIPDLVNAMRDKGNWTHPQRIRIAC

SEQ ID NO: 4604 - protein, 506 aa, unidentified
MYSTYKIQIHSDHKLFDYCDSLCFKAKNLYNITNYYVRQVYTALKAEKKNENQLQVLMDIETHLPIMNEIRLKHYEKEMEKPKKVDKKGKELEPKLKLFNMPTKEQSFIGYSFVEALFKVMKQIDYISMPSQSNQQTMKKVFDDWKSFFEASKKYKINPGCFSGKPKIPKYKTKTGRTTCYLTNQITAIKEGNVLKLPGTSLQLKLGKIDLSEGKLQQVRIVPFYGRYVVEIVFKAEQQEKAIVRTAEQNNHFIFKPKKVMGIDLGVDNLATIVDNLGLKPLLIKGTWLKSINQYYNKLRANYMGIIRHGKSPKEGVFMTNRLVALDRKRNNRVMDFLHKASVKVVTIAVERDIDTIIIGKNSGWKLDVNMRKSAKQTFIQIPYTTFIDMIRYKAERKGIQVIIREESYTSKSCFITKDPIPTFGEEHQTTFSGQRVKRAFYKITGSKIQIHADVNGAFNIVRKHVGGAFEGLDKKQFLQSPKKIIILKSKKKAKRKKKAKLKASA

SEQ ID NO: 4605 - protein, 426 aa, unidentified
MAKQVVTRTYTASIRNQSQVSDDLDALGFAASKLWNIGRWTCSRIWDEIGHIPNHTELTAYLKSHERYDDLHSQSSQRVLQELAEAFNGWYGKRRNGDTRANPPGYRKHNDDHPRSTVTFKAAGFKLDTQYNRVRLSQGSNLKEYWSDFILCAFQTRPDVDLSAVENVQQVKAVWTGDEWKLRFVCKVEVDVSESSGEQTVGIDLGINNFAALAYEDDHSELYPLNCLKQDDYYFSKRLARCDDSNSEQATRLNQKKSGRRTHYLHTLSKHIVQRCVEENVATIVVGDLSGIREDDETDASKDWGTHGNLDLHSWAFDRFTELLTYKAEMEGITVEKVSERDTSKSCSCCGRKRKANRVERGLYVCDNCGTTANADVNGAENIRQKVSPSSPNLSVNRSNGWLAQPSTFRFDKETGAFAPQEQVTS

SEQ ID NO: 4606 - protein, 543 aa, unidentified
MKTKDNILCTCIIRKDTPAGLYFGDICRKTKALRNTTNFYIRNTYTGIAKSPEERTHHETEVLHYVFTGIQKYNVHKEALFFRDLKKARKKCGLAGEAVVNRSLHRTMETPYPSVKRRMLTYETLDAVFKFTKNRDYYRLPAQVNQNAMRKTFQSWKGYFAALKDWKADPEKYEEVPGIPGYIREEEATAWFTNQTARILKTQKGCILSFIGTEVKAECGHITGTYVKTEVQPYHGEYRLLVTYDDKAECPEVPEHPRRIYGIDMGVNNFIAVCSSFGSAPFLIRGGAVKSWNQWYNKKRAALLGGLTKGKDSRHSEKHSRRLDALSRKRDERMRDFFYKCAHYICRRAVKEQVEVIVCGHNDGIKQCVDFKKKDNQNFVCIPERRFLSILAGVGAKYGIPVVIREESYTSQASAPDLDPIPTYGREKGEEPVFSGKRIKRGRYRTGDGHILNADINGAANILRKEYPEAFKDVTDFSYLWKTTETIGYRDFYKAVPKKKKEDAGKRNRPGRGSRKRHKERAARRMELKEAFPKKKTFVKKAS

SEQ ID NO: 4607 - protein, 382 aa, unidentified
MRRFAGACRFVFNRALALQNENHEAGNKYIPYGKMASWLVEWKNATETQWLKDAPSQPLQQSLKDLERAYKNFFRKRAAFPRFKKRGQNDAFRYPQGVKLDQENSRIFLPKLGWMRYRNSRQVTGVVKNVTASQSCGKWYISIQTENEVSTPVHPSALMVGLDAGVAKLATLSDGTVFGPVNSFQKNQKKLARLQRQLSRKVKFSNNWQKQKRKIQRLHSCIANICRDYLHKVTTTVSKNHAMIVIEDLKVSNMSKSAAGTVSQPGRNVRAKSGLNRSILDQGWYEMRRQLEYKQLWRGGQVLAVPPAYTSQRCACCGHTAKENRLSQSKFRCQACGYTANADVNGARNILAAGHAVLACGEMVQSGRPLKQEPTEMIQATA

SEQ ID NO: 4608 - protein, 437 aa, unidentified
MKRTVMVKLQPSKEQAKILFELADTGTKVWNRVNYLRRQQFFEGKIVDFNSTEKTVYEEFKREIGSATVQQIARKNAESWRSFFSLLRKKRNGELPNWLKPKPPNYLKENGRRKPLIVLRNDQYKIEGNKLILKGIGKFKRLEIQFKGRIHLKGKQGRLEITYDPVRRKWYAHLSFTVEEKLEGGEWVKLPRTPKGSLSAGIDLGVNNLMAVYVENGESFLVNGRPLKSIDFYWRRKIADYQSKLNKSGAKTSRKLRRMHRRSKLQAKHYLNTAVRQTVRKLYELGVSKIVVGYPKGIARNSDRGKKQNFILSHVWRFNYVIKRLTEVAEEYGIQVELVNEAFTSKTCPVCGKLHERARFVRGLFKCPATGLVFNADLVGAFNILKRAVKTITPNLSGLYAQRRGNWPKARPEGFEEPVPTGSLMRTPQTSPPLARG

SEQ ID NO: 4609 - protein, 437 aa, unidentified
MKRTVTVKLQPSKEQAKILHQLADLGVKVWNRVNYLRRQQFFKEQIVDFNSTEKTIYREFKREIGSATIQQICRKNAEAWRSFFSLLRKNRNGELPNWLKPKPPNYLREDGKRKPLIILRNDQYKIEGNKLILKGLGKFRRLEIQFKGRIHLKGKQGRLEITFDPIKRKWYAHVSLTVEEKLEDEEWVSVPRQPKGSLSAGIDLGVNNLMAVYVENGQSFLVNGRPLKSIDFYWRRKIAEYQSKLNKSGAKTSRKLKKMHEKAKLQAKHYINTAVRQTVKKLYDLGVSKIVVGYPKGIARNSDRGKRQNFLLSHVWRFNTVIKRLTKVAEEYGIRVVIVGEAFTSKTCPVCGKPHEGARFVRGLFKCPAMGLVFNADLVGAFNILKKVVETITPNLSGLYAQRRGNWPKARPEGFEEPVPTGSLMRTPQTSPPLARG

SEQ ID NO: 4610 - protein, 436 aa, unidentified
MKRTVTLKLQPSKEQAKTLHQLADTEAKVWNQVNYLRRQQFFKEQIVDFNKTEKTVYDEFKREIGSATVQQICRKNAEAWRSFFSLLRKKRNGELPNWLKPKPPNYLKENGRRKPLIVLRNDQYRIEGNKLILKGLGKFKRLEIQFKGRIHLKGKQGRLEIIYDPVKRRWYAHVSLAVEEKLESGEWIKLPRTPRGNLSAGIDLGVNNLMAVYVENGESFLVNGRPLKSIDFYWRKKIAEYQSKLNKSGAKTSRKLKRMHEKAKLQAKHYINTAVRQTVKKLYESGVKRIVVGYPKGIARNSDKGKRQNFILSHVWRFNYVIKRLTEVAEEYGISVEVVNEAFTSKLCPVCGKPHEGARFVRGLFKCPVTGLIFNADLVGAFNILRKVVTTITPNLSGLYAQRRGNWPKTRPEGSKTHFLVGLNETPQTSPSLVRD

SEQ ID NO: 4611 - protein, 437 aa, unidentified
MKRTVTVKLQPSKEQEKTLNQLADTGAKVWNRVNYLRRQQFFEDKIVDFNSTEKTVYEEFKREIGSATVQQIARKNAESWRSFFSLLRKKRNGELPSWLKPKPPNYLKEDGRRKPLIVLRNDQYKIEGNKLILKGLGKFKRLDIQFKGRIHLKGKQGRLEITYDPVRRKWYAHISLTVEEKLEGEEWVSVPRHPKGSLSAGIDLGVNNLMAVYVENGESFLVNGRLLKSIDFYWRRKIADYQSKLNKSGAKTSRKLKKMHGNAKLQAKHYINTAVRQTVKKLYDLGVSKIVIGYPKGIARNSDRGKKQNFLLSHVWRFNYVIKRLTEVAEEYGIQVELVNEAFTSKLCPVCGRPHEEARFVRGLFKCPATGLVFNADLVGAFNILKKAVNTITPNPSGLYAQRRGNWPKARPEGFEEPVPTGSLMRTPQTFLSMARG

SEQ ID NO: 4612 - protein, 414 aa, unidentified
MSWFSRMGQVYNGPMQRLQAFKYELMPNGEQQRDMRRFAGSCRFVFNKALALQKENYESGGKFIGYVEMAKRLTEWRNGTETPWLKDSPVHPLQHALKNLERAYKNFFGKRAAFPCFKKKGQRDSFRYPDSKQIKLDQANGRIFLPKLGWLRYRNCRDVLGTVKNATVSQSGGKWFVSVQTEREVEQPVPQANSAIGIDMGIARFATLSDGTYLAPLNSFKRHEAALRRAQQAMSRKTKFRNNWKKAKARVQRIHARIGNARRDYLHKATTTISKNHAMVCIEDLQVKNMSKSAAGSTEAPGKNVRAKSGLNRAILDQGWFEFRRQLDYKLAWNGGWLIAVPPQNTSRTCPCCGHVSPENRRTQAEFACEACSFEENADVVGAINVLARGHRVAACGEPVQSGRSVKQEPTEAI

SEQ ID NO: 4613 - protein, 400 aa, unidentified
MQRLQAFQFELMPSGERQRDMRRFAGACRFVFNKALALQKENHEAGGRFIGFVAMAKRLTAWRNGSETPWLKDAPVHPLQHSLKDLERAYQNFFAKRAAFPKYKKRGQRDSFRYPDPKQIKLDQANGRIFLPKLGWLRYRNSRTVQGEVRNATVSLSAGKWFVSIQTAREVEQPVPQASRAVGIDLGIARFATMSDGSYLAPLNSFRRHEARLRRAQRAMSRRTKFSYNWKKAKARLQRIHARIGNARRDYLHKATTTISQNHAMVCIEDLQVRNMSRSAAGSADAPGKNVRAKSGLNKAILDQGWFEFRRQLDYKLAWNGGWLIAVPPQNTSRTCPACDHVSAENRRTQARFACVACGFEESADVVGAINILARGHRVAACGEPAQSGRSVKQEPAEAI

SEQ ID NO: 4614 - protein, 413 aa, unidentified
MKLSFKFRPNINPTQLEIIEELSYHTTKLYNIISYDLRKNGFKNYYEIEKLYKNNWHCDFLHSHTRQQMFKILEQNWKSYFASIKDFGVNPSKYKGLPRPPKFKNTERNKNEIIFTNLAIRFQDGILKLSLSKSIQKLLKVDSLNFEVSNKLQNLINWNRLQQARFNYDKVQKCWYLIVIYNKDEVENSNDNVMSIDIGLDNLATITFKNGINQYVYCGKKLKSVNSYANKRIAYLQAIEMKKYGSDKFKNTKEINRLRKYRNNYINDYLHKVSKNIIDKAIKNNVGKIVIGKLKDIKQDMNYNKSFVQIPIQRLVELITYKAKLKGIEIKLQEESYTSGCSAIDLEPVTKKYYNKSRRITRGLFKSGYGILNADINGSLNILRKSEKCIPDLVNAMRDKGNWTHPQRIRIAC

SEQ ID NO: 4615 - protein, 482 aa, unidentified
MADIKRYTTMQIWVKKGYRMHSYFNEMCTNSKNLYNTTNFYIRQVYTGLTQTKALQPLQIEVLEAIKKHLPHMNKTQLLAYEKKRSKEETKPLDQQKDIKCNLFTEPSNEKPYVNYHFLDGFFKAAVQPDYRSLPTQSSQGVMKTVFQNWKSFYASLREYKAHPGKFKSKPKIPGYSRGKEKEISFSNQDCVIKENRYVKFPKTKERLNIGKMGFSEGKLKQIRVIPKHGHYVVEMVFEIPSQVKMRESKNRIMGIDLGIDNLATIVTTTGRRPVLVKGKNIKSVNQRFNQLKAYYVGILRQGKHPREGSFTSQRLEKIHQKRFKQIKDLFHKASHQMIKIALEEDVDTIVIGQNKDWKQNLDLGKRNNQSFTTIPHSLLIKMMTYKAERHGIHVLLTEESYTSKASFLDNDLLPVFGQNDVKRSFSGKRMKRGLYRSKNGTLLNADVNGAANIIRKVFANSFIEPSSPAASFMQPQTFVLK

SEQ ID NO: 4616 - protein, 425 aa, unidentified
MQRLQAFKYELMPTGEQQRQMRRFAGSCRFVFNKALALQKERFDRGEKKLGYAGMCKLLTEWKAVPKTLWLNETPSQALQQALKNLERAYKNFFEKRADFPRLKKKGQSDSLRYPQGVKLDQANARVFLPKLGWLRYRKSRDALGALRNVTVSLSGSAWFISIQTEREVEQPAPISTSAVGIDMGIARFATFSDGAFIAPLNSFRKHEARLRRYQRAMSRKVKFSKNWSKAKARVSRIQSRIGNARRDFLHKATTTISQNHAMVCIEDLQVRNMSRSAAGTAEKPGRSVRAKSGLNKSILDQGWAEFRRQLDYKLQWSGGYLIAVPPQYTSRTCPHCGHLSADNRKTQARFACVACGFEEHADLVGAINILSRGIQMLRDEGQDTAHACAGCVSTARIACEVSGAARPPAAGTHRSDSGAAQCLA

SEQ ID NO: 4617 - protein, 405 aa, unidentified
MQRLQAFKFELMPDGEQQRDMRRFAGSCRFVYNKALALQQAHYAESKKKLSYAGLCKQLTEWRKNEETKWLSETHSQPLQQTLKDLGRAYKNFFEKRADFPRFKKKGVSDSFRYPQGFKLDQGNSRVFLPKLGWLRYRNSRDVLGTVKNITVSQSSGKWFVSIQTEREIAEPVHPSTSIIGIDVGITRFASLSDGSFIEPLNTFRKYEQRLARCQRAMSRKKKFSNNWKKAKAKVQKLHTRIANIRRDYLHKTTTTISQNHAMVCIEDLQVRNMSKSAEGSVETPGRNVKAKSGLNKSILDQGWFEFRRQLEYKQVWRGGQVVAVNPRNTSRTCPCCGHVSAENRQTQARFACVECGFEENADLVGAINILAAGHAVLACGGTVQSGRPAKQEPAEATMQEFALV

SEQ ID NO: 4618 - protein, 437 aa, unidentified
MKRSVTVKLQPSKEQAKILHQLADSGAKAWNRVNYLRRQEFFQHKIVDFNSTEKTVYEEFKREIGSATVQQIARKNAEAWRSFFSLLRKKRNGELPSWLKPKPPLYLKEDGRRKPLIVLRNDQYKVEGNKLIFKGLGKFKRLEVQFKGRIHLKGKQGRLEITYDPVKRKWYAHVSLTVEEKLEGGEWVSVPRTPQGSLSAGIDLGVNNLMAVYVENGESFLVNGRPLKSIDFYWRRKIADYQSKLNKSGAKASRKLRRMHDKAKLQAKHYINTAVRGTVRKLYELGVSKIVVGYPKSIARNSDRGKRQNFLLSHVWRFNTVIKRLREVAEEYGIEVLIVGEAFTSKVCPVCGKPHEGARFVRGLFKCPATGLVFNADLVGAFNILKKVVKTITPNLGGLYAQRRGNGGKTLPEGFEEPFSRVALMRTPQTSPSLARG

SEQ ID NO: 4619 - protein, 436 aa, unidentified
MKRSVTVKLQPSKEQAKILHQLADSGAKAWNRVNYLRRQEFFQHKIVDFNSTEKTVYEEFKREIGSATVQQISRKNAEAWRSFFSLLRKKRNGELPNWLKPKPPNYLKEEGRRKPLIVLRNDQYKIEGNKLILKGLGKFKRLEVQFKGRVHLKGKQGRLEITYDPVKRKWYAHVSLTVGEKLEGGEWISIPRTPKGNLSAGIDLGVNNLMAIYVENGESFLVNGRPLKSIDFYWRRKIADYQSKLNKSGAKTSRRLKRMHVKAKLQAKHYINTAVRQTVRKLHELGVSKIVVGYPKGIARNSNKGKKQNFILSHVWRFNYVIKRLTEVAEEYGIKVVLVGEAFTSKVCPVCGKPHEGARFVRGLFKCPATGLVFNADLVGAFNILKKVVKTITPNLSGLYAQRRGNWPETRPEGLKARFELGFNEAPQTSPSVARD

SEQ ID NO: 4620 - protein, 435 aa, unidentified
MKRTVTIKLQPSKEAERILFKLADTGAKAWNRVNYLRRQQYFQEQIVDFNKTEKTVYEEFKRKIGSATVQQIARKNAEAWRSFFSLLRKKRNGELPNWLKPKPPNYLKEDGRRKPLIVLRNDQYKIEGNKLILKGLGKFRRLEIQFKGRIHLKGKQGRLEITYDEVKRKWYAHVSLTVGEKLEGGEWISIPRTPKGSLSAGIDLGVNNLMAVYVENGESFLVNGRPLKSIDFYWRKKIADYQSKLNKSGAKTSRRLKRMHGKAKLQAKHYINTAVRGTVKKLYELGVSKIVVGYPKGIARNSDKGSKQNFILSHVWRFNYVIKRLTEVAEEYGIKVVLVGEAFTSKTCPVCGEPHEGARFVRGLFKCPATGLIFNADLVGAFNILKKVVKTITPSLPGLSAGRGNGGKTLPEGLKTRFSAGLNEAPQTSPSVARG

SEQ ID NO: 4621 - protein, 436 aa, unidentified
MKRAVTLKLQPSKEQGKTLSELAGLGAKAWNRVNYLRRQQYFQGQIMDFNKTEKTVYEEFKREIGSATVQQIARKNAEAWRSFFSLLRKKRNGELPNWLKPKPPNYLKEDGGRKPLIVLRNDQYRIEGNKLILKGLGKFKKLEVQFKGRIHFKGKQGRLEITYDEVRRKWYAHIGYTAEEKLEGNSWVKVPREPKGNLSAGIDLGVNNLMAVYVENGESFLVNGRPLKSIDFYWRKRIADYQSKLNKSGAKTSRKLRRMHEKAKLQARHYINTAVRQTVRRLYNLGVSRIVVGYPKGIARNSDRGKKQNFILSHVWRFNTVIKRLKEVSEEYGIRVVVVNEAFTSKTCPVCGKPHEGARFVRGLFKCPATGLVFNADLVGAFNILKKAVKTITPSLPGLTAGRGNWPETRPEGFEKPVLTGSLMRTPRTSPSVARG

SEQ ID NO: 4622 - protein, 400 aa, unidentified
MQRLQAFKYELMPNGEQQRDMRRFAGSCRFVFNKALALQKENYESGGKFIGYVEMAKRLTEWRNGTETPWLKDSPVHPLQHALKNLERAYKNFFGKRAAFPCFKKKGQRDSFRYPDSKQIKLDQANGRIFLPKLGWLRYRNCRDVLGTVKNATVSQSGGKWFVSVQTEREVEQPVPQANSAIGIDMGIARFATLSDGTYLAPLNSFKRHEAALRRAQQAMSRKTKFRNNWKKAKARVQRIHARIGNARRDYLHKATTTISKNHAMVCIEDLQVKNMSKSAAGSTEAPGKNVRAKSGLNRAILDQGWFEFRRQLDYKLAWNGGWLIAVPPQNTSRTCPCCGHVSPENRRTQAEFACEACSFEENADVVGAINVLARGHRVAACGEPVQSGRSVKQEPTEAI

SEQ ID NO: 4623 - protein, 436 aa, unidentified
MKRTVTVKLQPSKEQAKILFKLADTGAKTWNRVNYLRRQEFFQEQIVDFNKTEKTIYEEFKREIGSATVQQIARKNAEAWRSFFSLLRKKRNGELPNWLKPKPPNYLKEDGRRKPLIVLRNDQYKIEGNKLILKGLGKFKRLEVQFKGRIHLKGRQGRLEITYDPVRRKWYAHLSFNVEEKLEGEEWIKLPRTPRGNLSAGIDLGVNNLMAVYVENGESFLVNGRPLKSIDFYWRKKIADYQSKLNKSGAKTSRKLRRMHEKAKLQAKHYINTAVRGTVRKLYDLGVSKIVVGYPKGIARNADKGSRQNFLLSHVWRFNTVIKRLREVAEEYGVRVVVVDEVFTSKVCPVCGKPHEGARFVRGLFKCPATGLVFNADLVGAFNILKKVVRTITPNLGGLFAQGRGNWPKTGPEGLKTRFSAGLNGTPQTSPSMARG

SEQ ID NO: 4624 - protein, 437 aa, unidentified
MKRTVTVKLQPSKEQAKILFKLADTGAKAWNRVNYLRRQQFFKEQIVDFNSTEKTIYEEFKREIGSATVQQIARKNAEAWRSFFSLLRKKRNGELPSWLKPKPPNYLKEGWQRKPLIVLRNDQYKIEGNKLILKGLGKFKRLEIQFKGRIHLKGKQGRLEITYDEVKRKWYAHVNLTVEEKLEGEEWVSIPRTPKGSLSAGIDLGVNNLMAVYVENGESFLVNGRPLKSIDFYWRRKIAEYQSKLNKSGAKTSRKLRRMHGKAKLQARHYINTAVRQTVRKLYDLGVSRIVVGYPKGIARNSDKGKKQNFLLSHVWRFNYVIKRLTEVAEEYGIRVVVVNEAFTSKLCPVCGKPHEGARFVRGLFKCPATGLVFNADLVGAFNILKKAVKTITPNLGGLYAQGRGNWPEIGPEGFEEPVLTGSLMRTPQTSPPLVRG

SEQ ID NO: 4625 - protein, 455 aa, unidentified
MKRTVTVKLQPSKEQEKTLFKLADAGAKVWNRVNYLRRQQFFQDQIVDFNSTEKTVYEEFKREIGSATVQQIARKNAEAWRSFFSLLRKKRNGELPDWLKPKPPNYLKEGWQRKPLILLRNDQYKIEGNKLILKGLGKFKRLEVQFKGRIHLRGRQGRLEITYDPVKRKWYAHVSFTVEEKFEGGEWVSIPRQPKGSLSAGIDLGVNNLMAVYVENGESFLVNGRPLKSIDFYWRRKIADYQSKLNKSGAKTSRKLRRMHEKAKLQAKHYINTAVRGTVKKLYDLGVSRIVVGYPKGIARNSDKGKKQNFLLSHVWRFNYVIKRLTEVAEEYGIRVVVVNEAFTSKLCPVCGKPHEGARFVRGLFKCPVTGLVFNADLVGAFNILKKVVGTITPNLGGLFAQGRGNGGKTLPEGFEDPLFSGFEWNPSNLPATGEGLTRWNPRLSWEEVRRRTVT

SEQ ID NO: 4626 - protein, 436 aa, unidentified
MKRSVTLKLQPSKEQEKALFGLADTGAKVWNRVNYLRRQQFFQGKIVDFNSTEKTVYEGFKREIGSATVQQISRKNAEAWRSFFSLLRKKRNGELPNWLKPKPPNYLKEGWQRKPLIVLRNDQYKIKGNKLILKGLGKFRRLEIQFKGRIHLKGKQGRLEITYDPVRRKWYAHISLMVKEKLEGGEWVKLPRTPKGNLSAGIDLGVNNLMAIYVENGESFLVNGRPLKSIDFYWRKKIADYQSKLNKSGAKASRKLKRMYERAKLQARHYINTAVRQTVRRLYELGVSRIVVGYPKGIARNSDKGKKHNFILSHVWRFNTVIKRFTEIAEECGIEVFVVNEAFTSQTCPVCGKPHEGARFVRGLYSCPATGLVFNADLVGAFNILRKVVKTITPNLGGLFAQGRGNWSKARPEGLKTRFLVGLNGTPQTSLPLARG

SEQ ID NO: 4627 - protein, 413 aa, unidentified
MKLSFKFRPNINSKQLEIIEELSYHTIKLYNIISYDLRESGFKNYYEIEKLYKDNWHCDFLHSHTRQQMFKILEQNWKSYFASIKDFGVNPSKYKGLPRPPKFKSTERNKNEIIFTNLAIRFQDGILKLSLSKSIQKLFEVDSLNFEVSNKLQSLINWNRLQQARFNYDKVQKCWYLIVIYNKDEVENSNDNVMSIDIGLDNLATITFKNGINQYVYCGKKLKSVNSYANKRIAYLQVIEMKKYGSDKFKNTKEINRLRKYRNNYINDYLHKVSKNIIDKAIKNNVGKIVIGKLKDIKQDMNYNKSFVQIPIQRLVELITYKAKLKGIEIKLQEESYTSGCSAIDLEPVTKKYYNKSRRITRGLFKSGYGILNADINGSLNILRKAEKCIPDLVNAMRDKGNWTHPQRIRIAC

SEQ ID NO: 4628 - protein, 415 aa, unidentified
MKLSFKFYPKLNTQQLDIIEELSYHTTRLYNIANYDCRENEVKSYVEMNKLYKANYHKDFLHSHTYQHCLKVLEKNWKSYFVSIKDYKKNPNKYLGTPRQPKFKNTNNKKNEVIFTNFAIRYQDQVLKLSLSKAMKSTFKVQSLNFNMKDIKIPIDLDELQQIKIKWDNSSKQWYLIMIYNKEEVNLTDSYNNIMSIDLGLDNLATITFEQNTNLYIIDGKYAKSKNSYYNKKIAKLTSIAMKQCKDSKHFKRTKKIVKLQTKRKNFIKDYIHKSSKKIIDLAIINKCHTIVIGDFSGVKQENDAKSFVQIPQQELVDKVKYKAQLLGIEVAMQNESYTSGCSALDLEDIGKKYYNKSRRIHRGLFVSNNGIKINADVNGSINILRKYLKCSPKSLKMIMDNGVLDTPIRLRIAY

SEQ ID NO: 4629 - protein, 389 aa, unidentified
MLYYMNMQRTIRLRLGPTSEQASALLQTLRQHTACFNAVAAYGWENREKNGVRLHHATYHGLRERFPSLPAQLVIAARVRATEAIKSVLARKKKGRKASCPNAVLTPIRYDARTYSIKFPQGIVSLSSVAGRLKVPFAADPHAQHTLGRAVGFDSADLIYRKGRFWLHVVVTIPDVEFQPSGDVVGVDMGLSRPAVCSHNRFFGKRRWKEIERRYFRLRRSLQRKGTRSAKRHLRKLAGKVNRFRRDCDHVLSRRIVDSVQPGTVIVVENLVDIRTRTKQRGRESRRRLHSWSFARLRSFLAYKAAAKGCKVVGVDPRHTSQMCSRCGHVHRRNRRSQSRFLCRACGFELNADLNAARNIARKYLASGGMPAAGGPPSTGLACQPAQAG

SEQ ID NO: 4630 - protein, 318 aa, unidentified
MEVTRVIVIQLKPTKEQKIILKHLTYSASKLWNIANYNIKQGNIKPKELKPTLKENFWYKNLHSQSAQAVLEKLQIAWENCYKKHTKEPRFQPKDGHFPVRWKKQGLQINNGQIRLSLSKQTKQYLKNMHSIKSDYLWISLPKNLSLNGVQEVEIKPPSSKKLHYLIIKERNYVRDYIHKVSTFIVREALSKDVKTIAIGKLSKNITKIDIGRQNNEKLHKIPFGKLCNMIEYKAKEVGINVIYVNEGYTSQTCSICGDVNKTNRKYRGLYICKCGNVINADVNGGINILKRVSPNLTLGRSRGNLNIPTRVRMYNTL

SEQ ID NO: 4631 - protein, 481 aa, unidentified
MAMEKHYKTYQIWIKNGHRMHSNFKTSCKLAKNIYNTTNFYYRQVYTALTQIKELQPLQKEVLSTIQDNIGKMNDVQLHAYQKKREIEKLKPVETRKDVKCNLFKTPTKENPYVDYNFLDALFKVIVQNDYRSLPVQSSQGVMKTVFQNWKSFFESLKEYKINPTKFKGRPRIPGYNRSQEREVLFTNQDCVVKNNKYLKFPKTKEQLNIGKLGVVNGKIKQVRVIPKYGQYVVELVVDVPQSKEEMMLNERYMSIDIGIDNLATIVTNTGRRPILVKGKNVKSINQYYNKMKAHYLGILLKGKKTKEGPFTSNRLEKLYQNRSLKLKDIFHKASYHIVKTAVEECASVIIVGQNKDWKQEVNIGKKNNQSFVHIPHSMLISMITYKAEEYGIRVIVTEESYTSKASFLDGDNVPVYEKGKKHSFSGKRMKRGLYRSKEGVLLNADVNGASNIMKKAILRMLEKKITINSVQLFHPQTLIV

SEQ ID NO: 4632 - protein, 411 aa, unidentified
MAKHMKTYKFPAPPEYHTKCKELSKLAGRVYSKTVSLVRKIHKKKGFWLSMNTVQKYILRWAQNIPLHSQTKQALVQRYFEALKSYFKASKTNQGLKPPFRTPKYTNVVWKNQAVKLLEDGTLRLAMGNGNDPLYIPTTLPKEVDIRRVELVYDKRQDKYFFHVTVSFESQTNISGSKVVGVDLGVVHPIVASTEDKAVIYNGGVLNSKLRYRNKKLAELQKKLAKKKPGSRRYRKLVRAKRRLLAKLYNQIKDILHKYTTHFVGWCLTEGVGTIAIGDLRGIRDRVDYNSTANQKIHQWLFRKISDLIKTKAEALGIEVVFVDESYTSQTCPVCGAKHKTSTRNFRCLGCGFEWHRDAVGALNIRKKYTGESLVVGALASPVGVMYNSHLRCPVAMWSPWKPTFEWVKTS

SEQ ID NO: 4633 - protein, 411 aa, unidentified
MAKHMKTYKFPAPPEYHTKCKELSKLAGRVYSKTVSLVRKIHKKKGFWLSMNTVQKYILRWAQNIPLHSQTKQALVQRYFEALKSYFKASKTNQGLKPPFRTPKYTNVVWKNQAVKLLEDGTLRLAMGNGNDPLYIPTTLPKEVDIRRVELVYDKRQDKYFFHVTVSFESQTNISGSKVVGVDLGVVHPIVASTEDKAVIYNGGVLNSKLRYRNKKLAELQKKLAKKKPGSRRYRKLVRAKRRLLAKLYNQIKDILHKYTTHFVGWCLTEGVGTIAIGDLRGIRDRVDYNSTANQKIHQWLFRKISDLIKTKAEALGIEVVFVDESYTSQTCPVCGAKHKTSTRNFRCLGCGFEWHRDAVGALNIRKKYTGESLVVGALASPVGVRYNSHLRCPVIMWSPWKPTFEWAKTS

SEQ ID NO: 4634 - protein, 488 aa, unidentified
MTKENPSNYKTLQIWIKKGHRMYSYFQECCHNAKNMYNTTNFYIRQVYTGLTQEKELQPLQKEVLDHIHKNIGKMNDTQRLAYQKKLEKEKLKPKEEQKEITCNLFSEPNFEKPYVDYNFLDALFKAMIQNDYRALPTQCSQSIMKGLFQNWKSFFASLKDYKKNPNKYAGPPRIPKYIRSSEKEILYTNQDCIIKNDRFLKFPKTKLQLNIGKLGFTEGKLKQVRVIPKYNEYVVELVIDVPSEQQMIEENARYMSIDLGIDNLATIVTNTGMKPVLVKGKHVKSINQYYNKMKSHFTSVLRNGKQTNEGPFTSKRIEKLHQKRYLKIKDVFHKVSHHIVKLAQEEVCKIVIGQNKSWKQETNMGKRNNQTFCHIPHSLLIQMITYKANAVGIQVVVTEESYTSKASFLDNDFIPTYGENDQNTTFSGKRIERGIYRSANKTLINADVNAAANILRKVIPNAWTNGIEGLGVKQLANVLTPLTLIVR

SEQ ID NO: 4635 - protein, 422 aa, unidentified
MLETTRTYRAKIVNHSQVSDDLDDCGHSASKLWNVARYHIQQEWDDTGEIPSEADLKRELKDHERYSDLHSQSSQRVLEELAESFTGWFKKRKNGDTDANLPGYRKRGDNHPRSTVTWKQMGIKHDSKHNQLRLSKGFNLKNHRSDFILAEYETRPDVTVENIQQVRAVWNGDRWELHLVCKVEIPVEDAPGDNTAGIDLGIKNYLAIAYDDGDAELYPGNVLKQDKHYFTRDEYDTEGENGPSRRALRARQKLSRRKDHFLHALAKHIVEQCIDHEVGRIAIGDLSKIREDENGDARNWGKRGNKKLHGWEFDRFTTLLGYKAEEHGILVDRVSERDTSKTCSCCGRKRDANRVERGLYVCGSCGVTMNADVNGAVNIRRKITQSPPTEDMSNGRLARPAVHLFNQTSGRFAPSEQVSCEP

SEQ ID NO: 4636 - protein, 413 aa, unidentified
MKLSFKFRPNINPTQLEIIEELSYHTTKLYNIISYDLRKNGFKNYYEIEKLYKNNWHCDFLHSHTRQQMFKILEQNWKSYFASIKDFGVNPSKYKGLPRPPKFKNTERNKNEIIFTNLAIRFQDGILKLSLSKSIQKLLKVDSLNFEVSNKLQSLINWNRLQQARFNYDKVQKCWYLIVIYNKDEVENSNDNVMSIDIGLDNLATITFKNGINQYVYCGKKLKSVNSYANKRIAYLQAIEMKKYGSDKFKNTKEINRLRKYRNNYINDYLHKVSKNIIDKAIKNNVGKIVIGKLKDIKQDMNYNKSFVQIPIQRLVELITYKAKLKGIEIKLQEESYTSGCSAIDLEPVTKKYYNKSRRITRGLFKSGYGILNADINGSLNILRKSEKCIPDLVNAMRDKGNWTHPQRIRIAC

SEQ ID NO: 4637 - protein, 489 aa, unidentified
MAKENPSNYKTLQIWIKKGHRMYSYFQECCHNAKNMYNTTNFYIRQVYTGLTQEKELQPLQKEVLDHIHKNIGKMNDTQLLAYQKKLEKEKLKPKEEQKEITCNLFSEPNFEKPYVDYNFLDALFKAMIQNDYRALPTQCSQSIMKGVFQNWKSFFASLKDYKKNPNKYAGMPRIPKYIRSSEKEILYTNQDCIIKNSRFLKFPKTKLQLNIGKLGFTEGKLKQVRVIPKYNEYVVELVIDVPSEQQMIEENARYMSIDLGIDNLATIVTNTGMKPVLVKGKHVKSINQYYNKMKSHFTSILRNGKQTNEGPFTSKRIEKLHQKRYLKIKDVFHKVSHHIVKLAQEEDVCKIVIGQNKSWKQETNMGKRNNQSFCHIPHSLLIQMITYKANAVGIQVIVTEESYTSKASFLDNDFIPTYGENDQNTTFSGKRIKRGIYCSANKTLIHADVNAAANILRKVIPNAWTNGIEGLGVKQLANVLTPLTLIVR

SEQ ID NO: 4638 - protein, 422 aa, unidentified
MLKTTRTYRAKIVNHQQVSDDLDNCGHSASKLWNVARYHIQQEWDSTGEIPSEADLKRELKDHERYSDLHSQSSQRVLEELAESFNGWFKKRKNGDTDANPPGYRKRGDKHPRSTVTWKQNGIKHDSKHNQLRLSKGFNLKNHRSDFILAGYETRPDVTVENIQQVRAVWNGDRWELHLVCKVEIPVEEAPGDDTAGIDLGISNYLTIAYDDGDAELYPGNVLKQDKHYFTRDEYDTEGENGPSRRALRARQKLSRRKDHFLHALAKHIVEQCIGHEVGRIAVGDLSKIRVDENGESRNWGRGGNKKLHGWEFDRFTTLLEYKAEEHGILVDRTSERDTSKTCSCCGRKRDANRVERGLYVCESCGATMNADVNGAVNIRRKITQNPPTEDMSNGRLARPVAYLFTQTSGRFAPSEQVGCES

SEQ ID NO: 4639 - protein, 489 aa, unidentified
MTKENPSNYKTLQIWIKKGHRMYSYFQECCHNAKNMYNTTNFYIRQVYTGLTQEKELQPLQKEVLDNIHKNIGKMNDTQLLAYQKKLEKENLKPKEEQKEIKCNLFSEPNFEKPYVDYNFLDALFKAMIQNDYRALPTQCSQSIMKGLFQNWKSFFASLKDYKKNPNKYAGMPRIPKYIRSSEKEILYTNQDCIIKNGRFLKFPKTKLQLNIGKLGFTEGKLKQVRVIPKYNEYVVELVIDVPSEQQMIEENARYMSIDLGIDNLATIVTNTGMKPVLVKGKHVKSINQYYNKMRSHFTSILRNGKQTNKGPFTSKRIEKLHQKRYLKIKDVFHKVSHHIVKLAQEEEVCKIVIGQNKSWKQETNMGKRNNQSFCYIPHNLLIQMITYKANAVGIQVVVTEESYTSKASFLDNDFIPTYGENDQNTTFSGKRIERGIYRSANKTLINADVNAAANILRKVIPNAWTNGIEGLGVKQLANVLTPLTLIIR

SEQ ID NO: 4640 - protein, 422 aa, unidentified
MLETTRTYRAKIVNHPQVSDDLDECGHSASKLWNVARYHSEQEWDETGEIPSEADLKRELKDHERYSDLHSQSSQRVLEELAEAFNGWFKKRKNGDRDANPPGYRKRGDNHPRSTVTWKQNGIKHDSKHNQLRLSKGFNLKQHRSDFILAEYETRPDVTVENIQQVRAVWNGDRWELHLVCKVEIPVEDAPGDNTAGIDLGIKNYLAIAYDDGDAELYPGNVLKQDKHYFTRDEYDTEGKNGPSRRALRARQKLSRRKDHFLHALAKHVVERCIDHAVGRIAIGDLSQIREDENGDSRNWGMRGNKKLHGWEFDRFTTLLEYKAEEHGILVDRTSERDTSKTCSCCGRKLDANRVERGLYVCESCGATMNADVNGAVNIRRKITQNPPTGDMSNGRLARPAVHLFNQTSGRFAPSEQVGCKP

SEQ ID NO: 4641 - protein, 422 aa, unidentified
MLETTRTYRAKIVNHPQVSDDLDECGHSASKLWNVARYHSEQEWDETGEIPSEADLKRELKDHERYSDLHSQSSQRVLEELAEAFNGWFKKRKNGDRDANPPGYRKRGDNHPRSTVTWKQNGIKHDSKHNQLRLSKGFNLKQHRSDFILAEYETRPDVTVEDIQQVRAVWNGDRWELHLVCKVEIPVEDAPGDNTAGIDLGIKNYLAIAYEDGDAELYPGNVLKQDKHYFTRDEYDTEGKNGPSRRALRTRQKLARRKNHFLHTLAKHIVEGCIDHEVGRIAIGDLSKIREDENGDSRNWGKRGNKKLHGWEFDRFTTLLEYKAEEHGILVDRTSERDTSKTCSCCGRKLDANRVERGLYVCESCGATMNADVNGAVNIRRKITQNPPTGDMSNGRLARPAVHLFNQTSGRFAPSEQVGCKP

SEQ ID NO: 4642 - protein, 509 aa, unidentified
MKRLYSTYKIQIHSDHKLFDYCDSLCFKAKNLYNITNYYVRQVYTALKAEKKNENQLQVLMDIETHLPIMNEIRLKHYEKEMEKPKKVDKKGKELEPKLKLFNMPTKEQSFIGYSFVEALFKVMKQIDYISMPSQSNQQTMKKVFDDWKSFFEASKKYKINPGCFSGKPKIPKYKTKTGRTTCYLTNQITAIKEGNVLKLPGTSLQLKLGKIDLSEGKLQQVRIVPFYGRYVVEIVFKAEQQEKAIVRTAEQNNHFIFKPKKVMGIDLGVDNLATIVDNLGLKPLLIKGTWLKSINQYYNKLRANYMGIIRHGKSPKEGVFMTNRLVALDRKRNNRVMDFLHKASVKVVTIAVERDIDTIIIGKNSGWKLDVNMRKSAKQTFIQIPYTTFIDMIRYKAERKGIQVIIREESYTSKSCFITKDPIPTFGEEHQTTFSGQRVKRAFYKITGSKIQIHADVNGAFNIVRKHVGGAFEGLDKKQFLQSPKKIIILKSKKKAKRKKKAKLKASA

SEQ ID NO: 4643 - protein, 466 aa, unidentified
MLIWKAFGRVPILFQRRGMFRVKPSGTTLNLKRNGGEKVKRKKKKLDLFGQPIIEEPHQLLTAQAKIVNLSDSDALLLGLTGYVATKMWNVANHERKAVWQETGKIPGFADQCKTLKNNRWYKLLPSQTSQEVLAELDDSYLSWYGHRRNGDMAAKPPGFRKKDTLSTLTFKQNAFGMLDGNKVLLKLPQKTYERTRLELAYILPPDTTLGKVQQVKLSYEPKTGEWYLLIYHKVKIEYLPPANILAFDLGIVNIVAGYFSTGQSFVVPGGELLALDRYFHKMKAKTNSSRSRKCRGLNRKWSRQRKHYLHVLTKNIVEQAAAHNVSHILVGELKGIHQDKDWGAKQNQELHAWPYRKIIQTLTYKAALKGILVQEVSERNTSTTCPICGKRVKSARVERGLFVHCGQATNADAVGAFNILQRYLRDNGKTLLEVVGELARPVVNLFVWRKSTPLGREQGTFRSVA

SEQ ID NO: 4644 - protein, 443 aa, unidentified
MYTGLTQEKELQPLQKEVLDNIHKNIGKMNDTQRLAYQKKLEKEKLKPKEEQKEITCNLFSEPNFEKPYVDYNFLDALFKAMIQNDYRALPTQCSQSIMKGLFQNWKSFFASLKDYKKNPNKYAGMPRIPKYIRSSEKEILYTNQDCIIKNDRFLKFPKTKLQLNIGKLGFTEGKLKQVRVIPKYNEYVVELVIDVPSEQQMIEENARYMSIDLGIDNLATIVTNTGIKPVLVKGKHIKSINQYYNKMKSHFTSILRNGKQTNEGPFTSKRIEKLHQKRYLKIKDVFHKVSHRIVKLAQEEEVCKIVIGQNKSWKQKMNMGKRNNQSFCHIPHSLLIQMITYKANAVGIQVVVTEESYTSKASFLDNDFIPTYGENDQNTTFSGKRIKRGIYRSANKTLINADVNAAANILRKVIPNAWTNGIEGLSVKQLANVLTPLTLIVR

SEQ ID NO: 4645 - protein, 406 aa, unidentified
MAKLGRTIKMRLYPDTDQAEQFLAMSQEYQRLANVVSQWIFDHVFQLSWLKINHQLYKQFRQESPLNSQMIQSVFRTVVARYKTVREQMKQHPYHYKNEENKWIQIPKDLTWLVQPIQFRRPQADLVRQSNYSLVDKMQQISITTLDKRTKLGFTNKGFEKYFAEDWKLGTAKLVHSQGKWFLHIGITKEVSDFDTKDNPKIVGIDRGLRFLATVFDSEGKTLFFDGHKILRKRKKFLEIRRQLQGKGSKSARKRLKQLARRENRWMTDVNHRLAKTLVTAYGSHTLFVLEDLTNVTFNTDDLPKSLRNSHRSWSFFQLESFLTYKAQAIQSAVVKVNSAFTSQRCPKCGVVEKTNRHHKTHEYWCAQCQYRCNDDRLGAMNISMLGQDWLNGVKYPKIKKLTTAG

SEQ ID NO: 4646 - protein, 406 aa, unidentified
MTKLGRTIKLRLYPDTNQADQFLAMSHEYQRLANLVSQWIFEHEFQLSWLKINHHLYKVFRQASALNSQMVQSVFRTVVARYKTVQEQMKQHPYRYKNEENKWVQVPKDLTWLVKPIQFHRPQADLVRQGNYSFVDKMRQISITTLGKRTKLGFTDKGFEKYFTADWKLGTAKLIHNRGKWFLHIGITKEVSDFDQQGNPQVVGIDRGLRFLATAFDSEGKTIFFDGQKILRKRKKFLEIRRQLQSKGTKSAKKKLKQLAQRENRWMTDVNHRLAKTLVVAYGSHTLFVLEDLTNVTFNTDDLPKSLRNSHRSWSFFQLESFLTYKAQAIQSTVLKVSPAFTSQRCPKCGLVEKTNRHHDTHEYWCAQCQYRCNDDRLGAMNIEMLGQDWLSGAKHPKIKKLMTAG

SEQ ID NO: 4647 - protein, 406 aa, unidentified
MVKLGRTIKLRLYPDTNQANQFLAMSHEYQRLANLVSQWIFDHEFQLSWLKINHHLYKIFRQESVLNSQMVQSVFRTVVARYKTVQEQMKQHPYRYKNEENKWVQASKDLTWLVKPIQFHRPQADLVRQSNYSFVDKMQQISITTLGKRTKLGFTDKGFEKYFTEDWKLGTAKLVHNRGKWFLHIGITKEVSDFDAKNNPQIVGIDRGLRFLATAFDSERKTLFFDGQKVLRKRRKFLKVRRQLQSKNTTSAKRKLKQLAQRENRWMTDVNHRLAKTLVTAYGSHTLFVLEDLTNVTFNTDDLPKSLRNSHRSWSFFQLESFLAYKAQAIQSAVVKVNPAFTSQRCPKCGLVEKANRHHDTHEYWCAQCQYRCNDDRLGAMNIEMLGQDWLNGVKHPKIKKLTTAG

SEQ ID NO: 4648 - protein, 406 aa, unidentified
MAKLGRTIKLRLYPDTDQAEQFLVMSREYQRLANIVSQWIFDHEFQLSWLKINHWLYKQFRQESPLNSQMIQSVFRTVVARYKTVREQMKQHPYRYKNEEKQWIQTPRDLAWLVKPIQFRRPQADLVRQSNYSFVDKMRQISITTLGKRTKLGFTDRGFEKYFTADWKLGTAKLVHNRGKWFLHIGITKEVPDFDQQGNPQIVGIDRGLRFLATTFDSEGKTLFFDGQKILRKRKIFLEIRRQLQSKGTTSAKKKLKQLAQRENRWMTDVNHRIAKTLVTIYGSHTLFVLEDLTNVTFNTDDLPKALRNSHRSWSFFQLESFLMYKAQAIQSNVVKVNSAFTSQHCPKCGLVEKTNSHHETHEYWCQQCQYRCNDDRLGAMNIEMLGQNWLSGVKYPKIKKLTTAG

SEQ ID NO: 4649 - protein, 406 aa, unidentified
MTKLGRTIKMRLYPDANQAEQFLAMSQEYQRLANVVSQWIFDHSFQLSWLKINHQMYKQFRQESPLNSQMIQSVFRTVVARYKTVREQMKQHPYRYKNEENKWIQIPKDLTWLVQPIQFHRPQADLVRQSNYSFVSEMQQISITTLGKRTKLGFTNKGFEKYFAEDWKLGTAKLVRNRGKWFLHIGITKEVSDFNSKDDPQIVGIDRGLRFLATTIDSKGKTLFFDGKKILHKRKKFLEIRRQLQSKGSKSAKRKLKRLAQRENRWMTDINHRLAKTLVTTYGSHTLFVLEDLTNVTFNTDDLPKSLRNSHRSWSFFQLESFLTYKAQAIQSNVVKVDPAFTSQRCPKCGLVEKTNRHHETHEYRCKQCQYRCNDDRLGAMNIEMLGQDWLNGVKHPKIKKLTTAG

SEQ ID NO: 4650 - protein, 406 aa, unidentified
MAKLGRTIKLRLYPDADQAEQFLAMSQEYQRLANIVSQWIFDHAFQLSWLKINHQLYKQFRQESPLNSQMIQSVFRTVVARYKTVREQMKQHPYRYKNEENKWIQLPKDLTWLVNPIQFRRPQADLVRQSNYSFVSEMRQISITTLGKRTKLGFTNKGFEKYFTDDWKFGTAKLVHNRGKWFLHIGITKEVSDFSPKDNPKIVGIDRGLRFLATAFDDEGKTLFFDGQKILRKRMKFLGIRRQLQSKGSKSAKRKLKRLAQRENRWMTDVNHRLAKTLVAAYGSHTLFVLEDLTNVTFNTDDLPKSMRNSHRSWSFFQLESFLTYKARATQSTVVKVNPAFTSQRCPKCGLVEKTNRHHKTHEYWCTQCQYRCNDDRLGAMNISMLGQDWLNGVKHPKIKKLTTAG

SEQ ID NO: 4651 - protein, 406 aa, unidentified
MVKLGRTIKLRLYPDTNQANQFLAMNHEYQRLANLVSQWIFDHEFQLSWLKINHHLYKIFRQESVLNSQMVQSVFRTVVARYKTVQKQMKQHPYRYKNEENKWVQVSKDLTWLVKPIQFHRPQADLVRQSNYSFVDKMRQISITTLGKRTKLGFTDKGFEKYFTEDWKLGTAKLVHNRGKWFLHIGITKEVSDFNSKDNPQIVGIDRGLRFLATAFDSEGKTLFFDGQKVLRKRKKFLKVRRQLQSKNTTSAKRKLKQLAQRENRWMTDVNHRLAKTLVTAYGSHTLFVLEDLTNVTFNIDDLPKALRNNHRSWSFFQLESFLTYKAQAIQSAVVKVNPAFTSQRCPKCGLVEKANRHHDTHEYWCSQCQYRCNDDRLGAMNIEMLGQDWLNGVKHPKIKKLTTAG

SEQ ID NO: 4652 - protein, 406 aa, unidentified
MAKLGRTIKMRLYPDTDQAEQFLAMSQEYQRLANVVSQWIFDHAFQLSWLKINHQLYKRFRQESPLNSQMIQSVFRTVVARYKTVREQMKQHPYRYKNEENKWIQLPKDLTWLVSPIQFHRPQADLVRQSNYSFVDKMRQISITTLGKRTKLGFTNKGFEEYFAANWKFGTAKLIHNRGKWFLHIGITKEVSDFDTKNQPQIVGIDRGLRFLATAFDSEGKTLFFDGQKILRKRKKFLESRRQLQSKGTKSAKKKLKQLARRENRWMTDVNHRLAKTLVTAYGSHTLFVLEDLTNVTFNTSDFPKSLRNSHRSWSFFQLESFLMYKAQAIQSAVVKVNPAFTSQRCPKCGLVEKTNRHHDTHEYWCAQCQYRCNDDRLGAMNILILGQGWLNGVKHPKIKKLTTAG

SEQ ID NO: 4653 - protein, 406 aa, unidentified
MAKLGRTIKLRLYPDTNQANQFLAMSHEYQRLANLVSQWIFDHEFQLSWLKINHHLYKIFRQESVLNIQMVQSVFRTVVARYKTVQEQMKQHPYRYKNEENKWVQVSKDLTWLVKPIQFHRPQADLVRQSNYSFVDKMRKISITTLGKRTKLGFTDKGFEKYFSEDWKLGTAKLVHNRGKWFLHIGITKEVPDFEQQGNPQIVGIDRGLRFLATAFDSKGETLFFDGKKILHKRKKFLEIRRQLQSKGTTSAKRKLNQLAQRENRWMTDINHRIAKTLVVAYGSHTLFVLEDLTNVTFNTDDLPKALRNSHRSWSFFQLESFLTYKAQAIQSKVVKVDPAFTSQRCPKCGLVEKANRHHETHEYRCKQCQYRCNDDRLGAMNIEMLGQDWLSGVKHPKIKKLTTAG

SEQ ID NO: 4654 - protein, 417 aa, unidentified
MANQVTRTYVASIHNHQQVCEDLDSLGFAASKLWNVARWTCDRIWDETGTIPDHGALKAYLKNNEHYADLNAQSSQAILEELAEAFDSWYTLRGNGDKKANPPGYRKHGDDHPRSTVTFKEDGFKHDPDHDRIRLSKGRNLKDGRQDFILCEYAVDPDVTVQNVQQVRAVWTGTDWELHIVCNVERDDPDPPGDRVAGIDLGICNFAAVAVGDDALLYPGGALKEDDYYFQKQRAKCDDSSSRKAQRLDRKRGERRTHFFHAVSKDIVAECAARNVGTIVVGDLTGIRENTDWGDHGNLDLHGWAFDNFTQMLEYKAAEYGISVERVDERGTSKSCGSCGTIDDSQRVERGLYVCDECGLVANADVNGAENIRQKVLPSLACDGGDRDNGWMAQPAVRLFDTSTGRIAPQEQVTCEP

SEQ ID NO: 4655 - protein, 486 aa, unidentified
MEEEKETNKRYRTYQIHIKKGHKLYAYFNELTLTSNNLYNTTNFYIRQVYTAFKQGNVLQPLQKEVMDSITLNIGKMNGKQHKAYLKRLNNEMKKPENERKEVKENLFTLPTKESSFIGFNFLDCLFKTIKQTDYNSLPGQINQQVIRNVVQNWKSFFTSLKDYKAHPEKYKGRPSIPAYLPKGGRKEIVLSNQICKIKDGKYLQFPKTNIQLNIGKLAQLEGTYQQVRVVPKYNEFTVEVIFLMKETEVIVAKKESCMGIDLGLNNLATVVFNTGISPIIFKGGKVKSINQWYNKLRSHYYAVLRNGKSPKEGKYDSKRLMNLDKKRYRKIKDFFHKVSYNIVKVARENGIDTIVIGKNSDWKQEINTGKRNNQHFVQIPHTLLIELITYKANDIGIAVMTTEESYTSKASFLDEDDIPTYQVGNNETYTFSGKRIKRGLYRSKHNRLINADVNGAANIVRKVIPNAFANGIAAMCSSPLVVNVH

SEQ ID NO: 4656 - protein, 498 aa, unidentified
MYRSYKIQIHLEHKLFDYCDSLCFKAKNLYNVTNYYIRQVYTALKKETRNENQLQVLTDIQDFLPQMNQIRLKSFERANSKHKKVDNNDQVLEPKLKLFEMPHPEKAFLPYNFVEALFKVMKQTDYISMPSQSNQQTIRKVYDDWKSFFEATKKYKTKPTSFSGKPRIPKYKPKNGRTTCYLTNQITKIKNGKVLSLPGTPLTLKLGKIAHIDGKLQQVRIVPSYGRYVIEAIFKSEQEKEIKRSKDQLNEWLFEPKRVMGIDLGVDNLATIIDNTGLKPLLIKGKWLKSINQYYNKLRAKYMSILRNGKGPKEGKFNTTRLISLDRKRNNRVIDFLHRASAKVVEIAKERTIDTIIIGKNEGWKMEVDMQKTSKQTFIQIPYATFIGMVRYKAERNGIQVIVREESYTSKSSFLNHDPIPTYGEDHQTNFNGYRSSRAFYKIKGSKILIHADVNGAFNIVRKHTKDVFEGLERKQFLQSPRKIIIMKNPKAKLKASA

SEQ ID NO: 4657 - protein, 470 aa, unidentified
MYSAYKIQIHSDHELFEYCDSLCFKAKNLYNITNYYVRQVYTALKVEKKNENQLQVLLDIETYLPIMNEIRQKHYEKEMVKPKKIDKKGKEIEPKLKLFKMPTKDQSFIGYSFVEALFKVMKQVDYTSMPSQSNQQTMKKVFDDWKSFFKASKKYKINPSCFSGKPKIPKYKSKTSRTTCYLTNQITEIKEGNVLKLPGTRFQLKLGKVALSEGKLQQVRIVPSYGQYVVEVVFKAEPQEKAIVRTEEQINKFIFEPKKVMGIDLGVDNLATIVDNTGLKPLLIKGTWLKSINQYYNKLRANYMSIIRNGKSPKEGVFTTNRLVALDRKRNNRVMDFLHKASVKVVTIAVERDIDTIIIGKNPGWKLDVNMRKSAKQTFIQIPYTTLIDMIRYKAERKGIQVIIREESYTSKSCFITKDPIPTFGEVHQTPFSGQRVKRAFYKVTGSEIQIHADVKRGFQYCSETCIWCL

SEQ ID NO: 4658 - protein, 542 aa, unidentified
MRTWRMTFNPKKQKDPVFCQYFLTNTTDARRMYNTANFYIRNTMTGIKKSPELRTPNEVEVLHDVFTGIQKANKVKDSKYQKDLEKYNQRLSEKQPKEPKHFPYPASKEWFLTYNVLDAVFKYTHNEVYYSMNSQLNQNAIRKVVAAWKGYFKTLRDYRKNPSKYKERPNMPGYLKNPQYVAWFSNQTAKYSVEKDGKAYLRFTKNKDLFCIGKASLYAGLRYVKTEIKPKHGCYLILVTFDDGVELPKVPEKPKRIIGIDPGIDNLAAVVNNFGVHPFLIKGGAVKAANQWFNKKRASLLSAVTAGSDSRHSVKNSHSLHTLSRKRDDLLRDIFYRAAWYICRFSVRHQVDVIVIGHNKEQKQEISLGKQNNQSFVSIPFVRFEQILTNTAAKCGIPVIVQEESYTSKSSILDGDDIPTYGINDDHVHFSGKRVKRGLYRCADGTLLNADVNGAANVIRKKYPYAFERQDLQYLWETTNVVKFTDLYPGAKSICQEKYNGKKHRPSPASKARHGYRKNIRLQYRMLFGKSKYVHASVKKSA

SEQ ID NO: 4659 - protein, 542 aa, unidentified
MRTWRMTFNPKKQKDAVFCQYFLTNTTDARRMYNTANFYIRNTMTGIKKSPELRTPNEVEVLHDVFTGIQKANKAKDSKYQKDLEKYNKGLLDKHPKRPKHFPYPTTKEWFLTYNVLDAVFKYTNNEVYYSMNSQLNQNAIRKIAVAWKGYFKILKDYQKNPSKYKERPNMPGYLRNSQYVAWFSNQTAKYSVEKDGRAYLRFTKNKDLFCIGKASLYIGLRYVKTEIKPQHGCYLILVTFDDGIELPKVPEKPKRVIGIDPGVDNLAAVVNNFGVHPFLIKGGAVKAANQRFNKKRASLFSAVTTGSDSRHSVKNSHSLSALSRKRDDLLRDIFYRAAWYICRFAVRHQVDVIVIGHNKDQKQEINLGKQNNQSFVSIPFVRFEQILTNTAAKCGIPVVVQEESYTSKASVLDGDVIPTYGIDDDHVHFSGKRVKRGLYRSADGTFLNADVNGAANVIRKKYPDAFDGQDLKYLWETTDVVKFTDLYPGAKSTCQEHYNGKRHESSPASKAIHRYRKDTRLKYRILFGKSKYVHTSAKKSA

SEQ ID NO: 4660 - protein, 545 aa, unidentified
MRTWKIMTKPDKDAVLCRYFEENTTAAKCMYNVANFFIRNTMTGMRKSPEERTSHETEVLHYVFTGIQKANAHAYEVYCKKREDCKKTGGMAGAVRVSRLKCKVFPYPTRAEWFLSYTVLDAIFKYTDHPTYRRMNSQVNQNAIKKTVKSWKSYFQLRKDYAIHPEKYKARPRIPGYVKNPAMTAAYTNQTAKFIRKDGCAYLRFVNHKQPVLVGRESLYSDMTYVKTEVKPQYGGYSILLTFKEDIILPEVPKFPKRILGIDVGVDNFCAVANNFGDTPFLIKGGAIKSMNQNFNKERARLLSEVTKGSDSTHSVKKTKQLHTLSRRRETRLRDFFYKTAWYLVRYAKRQQVEVIVAGHNEDQKQNICIGRQNNQNFVSIPFCRFLDILRYTAAKAGIPVVLREESYTSKASLLDLDAIPAYKKGDTINHTFSGKRVRRGLYKTNSGFFINADINGAGNILRKEYPYAYDGQNMKYLCETTEVVSYTDIYAGATSLCKKKYNQKKHTPGLGSCVNHRYKKETRMKYCILWGKSKYCYISQAKSA

SEQ ID NO: 4661 - protein, 435 aa, unidentified
MKRTVTVKLQPSKTQEKALFELSDISAKAWNRANHLRRQEYFQGTPIDFLKTQKTVYEEFKREIGSVTVQQICRKNAEAWRSFFSLLRKKRNGELPNWFKPKPPNYLKEDGRRKALIVLRNDQYRIEGNKLVLKGLGKFKRLEIQFKGRIHLKGKRGRLEITYDEVKRKWYAHISVTVKEKLEGGEWIEFPRIPKGNLSAGIDLGVNNLMAVYVESGESFLVNGRPLKSIDFYWRRRIADYQSKLNKNGAKTSRKLKRMHERAKLQAKHYINTAVRQTVRRLYELGVSKIVIGYPKGIARNSDKGKKQNFILSHVWRFNYMIKRLTEVAEEYGIRVLVVNEAFTSKTCPVCGKPHKGARFVRGLFKCPATGLIFNADLVGAFNILRKVVETITPNLGGLYAQGRGNRPKTGPEGLEEPVLMGSLMRTPRTSPHGV

SEQ ID NO: 4662 - protein, 435 aa, unidentified
MKRSVTVKLQPSKEQAKILSELADLGAKVWNRVNYLRRHQYFQEQIVDFNGTEKTVYEEFKKEIGSATVQQICRKNAEAWRSFFSLLRKKRNGELPSWLKPKPPNYLKEDGRRKPLIVLRNDQYRIEGNRLTLKGLGKFKKLEVQFKGRIHLKGKQGRLEITYDPVKRKWYAHISLTVEEKLEGGEWVKVPKEPLGNLSAGIDLGVNNLMAVYVENGESFLVNGRPLKSIDFYWRKKIAEHQSKLNKSGAKTSRKLRRMHEKAKLQAKHYINTAVRQTIKKLYELGVSRIVVGYPKGIARNSDKGRRQNFLLSHVWRFNTVIRRLTEVAEEYGIVVEVVNEAFTSKTCPVCGKPHEGARFVRGLFKCPATGLVFNSDLVGAFNILKKAVRTITPNLGGLYAHGRGNWPEARPEGFEEPFSRVPLMRTPQTSPPLS

SEQ ID NO: 4663 - protein, 312 aa, unidentified
MAKLGRTIKLRLYPDADQAEQFLAMSQEYQRLANIVSQWIFDHAFQLSWLKINHQLYKQFRQESPLNSQMIQSVFRTVVARYKTVREQMKQHPYRYKNEENKWIQLPKDLTWLVNPIQFRRPQADLVRQSNYSFVSEMRQISITTLGKRTKLGFTNKGFEKYFTDDWKFGTAKLVHNRGKWFLHIGITKEVSDFSPKDNPKIVGIDRGLRFLATAFDDEGKTLFFDGQKILRKRMKFLGIRRQLQSKGSKSAKRKLKRLAQRENRWMTDVNHRLAKTLVAAYGSHTLFVLEDLTNVTFNTDXXXXGLLKVPS

SEQ ID NO: 4664 - protein, 405 aa, unidentified
MAKLGRTIKMRLYPDTDQAEQFLAMSQEYQRLANVVSQWIFDHAFQLSWLKINHQLYKRFRQESPLNSQMIQSVFRTVVARYKTVREQMKQHPYRYKNEENKWIQLPKDLTWLVSPIQFHRPQADLVRQSNYSFVDKMRQISITTLGKRTKLGFTNKGFEEYFAANWKFGTAKLIHNRGKWFLHIGITKEVSDFDTKNQPQIVGIDRGLRFLATAFDSEGKTLFFDGQKILRKRKKFLESRRQLQSKGTKSAKKKLKQLARRENRWMTDVNHRLAKTLVTAYGSHTLFVLEDLTNVTFNTSDFPKSLRNSHRSWSFFQLESFLXXXXAIQSAVVKVNPAFTSQRCPKCGLVEKTNRHHDTHEYWCAQCQYRCNDDRLGAMNILILGQGWLNGVKHPKIKKLTTAG

SEQ ID NO: 4665 - protein, 478 aa, unidentified
MYRTQQIRIKKGHRLYPYCDQLTFLAKNLYNATNFHIRQIFTAFDEGKNLQPQQQEVFDLIDQHLPQMNAIKRNTVEKKRQKELKKPVDERQEIQDAVLFEYPSAQQKWPSYAFLDSLFKVSENADYLALPGQVNQQVMRLVFQNWKAYFVSLKDYKVHPDKYIGRPKIPKYVPKNGRIACVFSNQVCKVKDDKYLRFPQTKERLNIGKLGLKGPLQQVRMIPTYGEYTIELVIRKEEEKERLELDEQHIMGIDLGVDCLATIVDNTGSSPVIIKGQMVKSINQYYNKQRAHYYCVLRQGKGPQEGSFQSKRLHRLDQKRFFKLKDAFHKASFHIVQLALARKVSTIVIGVNKGWKQKVSLRKQDKQHFQTLPHTMLIRMIAYKAEAYDIRVHQQEESYTSKASLVDMDELPHYEKGVPTKVRFSGRRIKRGLYRTKEKTFIHADVNAAGNIIRKVVPNALAEGIEGVVSRPLMLSIV

SEQ ID NO: 4666 - protein, 494 aa, unidentified
MCVCLLSATKKGEVKNVYRTQQIRIKKGHRLYPYCDQLTFLAKNLYNATNFHIRQIFTAFGEGKNLQPLQQEVFYLIDQHLPQMNAIKRKTVEKKRQKELKKPVDERQEIQDAVLFEYPSAQQKWPSYAFLDSLFKVSENVDYLALPGQVNQQVMRRVFQNWKAYFASLKEYQVHPHKYTGRPKIPKYAPKNGRIACVFSNQVCKVKDDKYVRFPHTKERLNIGKLGLKGPLQQVRMIPTYGEYTIELVIRKEEEKPLVELDEQHIMGIDLGVDCLATIVDNTGSSPVIIKGQAVKSINQYYNKQRAHYSRVLRHGKGPKEGSFQSKRLQRLDQKRFFKLKDAFHKASFHIVQLALARKVSTIVIGVNKGWKQKVSLRKQDKQHFQTLPHAMLIRMIAYKAEAYGIHVHQQEESYTSKASLVDMDELPLYEKGVPAKVRFSGQRVKRGLYRTKENTCIHADVNAAGNIIRKVVPNAFAKGIEGVVSRPLMLSIV

SEQ ID NO: 4667 - protein, 489 aa, unidentified
MATTEKQYKTHQILIKKGHRLFNYCEQATSNAKNMYNTTNFYIRQAYTALKSDKELQPLQHEVLENIQEHLPKMNDVQLAAYLRKAEKDKAKPKEKRKELKCNLFEGPTQEKPFVDYNFLDALFKSMVQNDYRSLPTQSAQAVMKNVFQNWKSFFSSLKDYKKNPSKYKGRPRIPNYSRAKQKEVVFSNQDCVVKDQRFLKFPKTKERLNIGKLGLTEGKLKQVRVIPRHGHYVVEVIMETQPKNEPKADNNKYMAIDLGIDNLATIITNTGHRPVLLKGKNIKSINQLYNKKRAHLYGVLRQGKGAKEGSFSSNALTGLYQKRQRKIKDLFHKASRNIVNLALREDVSTIVIGLNKQWKQETNMSKRNNQSFTSIPHGMLLNMVEYKAVEHGIKVEIREESYTSKASFLDNDVIPTYGKKTKGKPVFSGKRIKRGLYRSSNGTLLNADVNGACNILRKAFPNALANGIEGLDGSQSINVSTPLSLIVR

SEQ ID NO: 4668 - protein, 414 aa, unidentified
MKLSFKFKQKLSQQQINIIEELSFHTTKIYNTANYICRETEYKSYTKLEKELKSNWHNEYLHSHNYQQCLKILEQNWKSYFASIKDYKKNSSKYKGMPQPPKYKNNKDKKNEVIFTNLAIRYQDGLLKLSLSKKIKEKFQVQSLNFAIESSKIPVNFSEIQQIKIKWDISDKEWYLIIIYNQQEANITENFKNIMAVDLGLDNIATLTFMDNKECIIVDGKEAKSKNSYYNKEIARLTSVAMKQQGDSNFFKRTKKIVKLQKKRNNYMNDFVHKVSKKIVDYAIWNECKTIVVGDISGIKQNNGTKTFVQIPIQKIVDKLKYKAELLGIEVVLQEESYTSGCSALDMEEINKQNYDKTRRIQRGLFQSKSGILINADMNGSLNILRKYTKCTPRAIENVRDNGFLNNPVRIRVV

SEQ ID NO: 4669 - protein, 422 aa, unidentified
MLETTRTYRAKIVNHSQVSDDLDDCGHSASKLWNVARYHAQQEWDNTGEIPSEADLKRELKDHERYSDLHSQSSQRVLEELAESFNGWFKKHKNGDTDANPPGYRKRGDKHPRSTVTWKQNGIKHDSKHNQLRLSKGFNLKNHRSDFILAEYETRPDVTVENIQQVRAVWNGDCWELHLVCKVEIPVEDAPGDNTAGIDLGIKNYLAIAYDDGDAELYPGNVLKQDKHYFTRDEYDTEGENGPSRRGLRSRQKLSRRKDHFLHALAKHTVEQCIDHEVGRIAIGDLSKIREDENGDARNWGKRGNKKLHGWEFDRFTTLLEYKAEEHGILVDRTSERDTSKTCSCCGRKRDANRVERGLYVCGSCGAAMNADVNGAVNIRRKITQSPPTGDMSNGRLARPAVHLFNQTSGRFAPSEQVGCKP

SEQ ID NO: 4670 - protein, 443 aa, unidentified
MKRSVTVKLQPSKGQETTLFELASVGAKIWNHVNYLRRQQYFQGKIVDFNKTEKTVYEKYKHEIGSATVQQICRKNAEAWRSFFALLRKKRNGELPEKQNPKPPKYRKKGEKRRPLIVLRNDQYRIEGNKLILKGLGKFGKLEIQFKGRIHLRGKIGRLEITYDDVKRKWYAHVSFSKVKERLEKNEWVKLPRQPKGSLSAGIDLGINNLMAIYVENGESFLVSGRPVKAIDFYFQKRTAEYQSKLNKSGGTRSRMLKKLHPTAKLQARHYINAVVRGTVRKLYELGVSRIVVGYPKGIAQNLKGEERSGKRSKKQNFLLSKVWRYNYVIKRLTEVAEEYGIQVELVDEAYTSKICPVCGRPHEGARFVRGLFKCPETGFVFNADLVGAFNILKKRVETITPNLGGLYAHGRGNWPKARPGGFERTALTGSLMKTPQTFPPVG

SEQ ID NO: 4671 - protein, 387 aa, unidentified
MQRLQAFKFELMPSGEQQRQMRRYAGSCRFVYNKALALQKENYDAGGKFIGYVAMAKHLTAWRNGPQTPWLKDSPVHTLQHALKDMERSYKNFFAKRAAFPKFKKKGQRDSFRYPDPKQIKLDQANSRIFLPKLGWLRYRNSRDVLGAVRNATVSQSGGKWFVSIQTEREVEQPIPQGTSAIGIDVGIARFATMSDGTYFAALNSFKRHETRLRRAQRAMSRKTKFSSNWKKAKARIQRIHARIGNARRDYLHKATTTISQNHAMVCIEDLQVRNMSKSAAGNTETPGKNVRAKSGLNKSILDQGWFEFRRQLDYKLAWNGGWLIAVPPANTSRRCPVCGCVNAENRLTQAQFSCVECGFEENADVVGAINVLARGHRVAACGEAAQ

SEQ ID NO: 4672 - protein, 387 aa, unidentified
MQRLQAFKFELMPSGEQQRQMRRYAGSCRFVYNKALALQKENYDAGGKFIGYVAMAKHLTAWRNGPQTPWLKDSPVHTLQHALKDMERAYKNFFAKRAAFPKFKKKGQRDSFRYPDPKQIKLDQANSRIFLPKLGWLRYRNSRDVLGAVRNATVSQSGGKWFVSIQTEREVEQPIPQGTSAIGIDVGIARFATMSDGTYFAALNSFKRHETRLRRAQRAMSRKTKFSSNWKKAKARIQRIHARIGNARRDYLHKATTTISQNHAMVCIEDLQVRNMSKSAAGNTETPGKNVRAKSGLNKSILDQGWFEFRRQLDYKLAWNGGWLIAVPPANTSRRCPVCGCVNAENRLTQAQFSCVECGFEENADVVGAINVLARGHRVAACGEAAQ

SEQ ID NO: 4673 - protein, 400 aa, unidentified
MQRLQAFKFELMPTGEQQRDMRRVAGSCRFVYNKALALQKENYDAGGKFINYVAMAKHLTAWRNGSETPWLKDLPVHPLQHALKDLERAYKNFFGKRAAFPRLKKKGKSDRFRYPDRKQIKLDQGNSRIFLPKLGWLRYRNSRGVLGELRNATVSRSAGKWFVSIQTQREVDPPVPQATRAVGIDVGVARFATMSDGTFLAPLNSFKQHEARLCRAQRAMSRKMKFSSNWKKAKARIQRIHSRIGNARRDYLHKATTTISNNHAMVCIEDLQVRNMSRSAAGNAENPGKNVRAKSGLNKAILDQGWSEFRRQLDYKLAWNGGWLIAVPPANTSRTCPACGCVSAENRLTQARFACIECGFEENADVVGAINVLARGHRVAACGEPVQSGPSVKQEPAEAI

SEQ ID NO: 4674 - protein, 387 aa, unidentified
MQRLQAFKFELMPSGEQQRQMRRYAGSCRFVYNKALALQKENYDAGGKFIGYVAMAKHLTAWRNGPQTPWLKDSPVHTLQHALKDMERAYKNFFAKRAAFPKFKKKGQRDSFRYPDPKQIKLDQANSRIFLPKLGWLRYRNSRDVLGAVRNATVSQSGGKWFVSIQTEREVEQPIPQGTSAIGIDVGIARFATMSDGTYFAALNSFKRHETRLRRAQRAMSRKTKFSSNWKKAKARIQRIHARIGNARRDYLHKATTTISQNHAMVRIEDLQVRNMSKSAAGNTETPGKNVRAKSGLNKSILDQGWFEFRRQLDYKLAWNGGWLIAVPPANTSRRCPVCGCVNAENRLTQAQFSCIECGFEENADVVGAINVLARGHRVAACGEAAQ

SEQ ID NO: 4675 - protein, 387 aa, unidentified
MQRLQAFKFELMPSGEQQRQMRRYAGSCRFVYNKALALQKENYDAGGKFIGYVAMAKHLTAWRNGPQTPWLKDSPVHTLQHALKDMERAYKNFFAKRAAFPKFKKKGQRDSFRYPDPKQIKLDQANSRIFLPKLGWLRYRNSRDVLGAVRNATVSQSGGKWFVSIQTEREVEQPIPQGTSAIGIDVGIARFATMSDGTYFAALNSFKRHETRLRRAQRAMSRKTKFSSNWKKAKARIQRIHARIGNARRDYLHKATTTISQNHAMVCIEDLQVRNMSKSAAGNTETPGKNVRAKSGLNKSILDQGWFEFRRQLDYKLAWNGGWLIAVPPANTSRRCPVCGCVNAENRLTQAQFSCIECGFEENADVVGAINVLARGHRVAACGEAAQ

SEQ ID NO: 4676 - protein, 400 aa, unidentified
MQRLQAFKFELMPTGEQRRDMRRFAGACRFVFNKALALQRENYEAGGKFIGYVAMAKRLTAWRNGSETSWLKDPPVHPLQHALKDLERAYQNFFAKRAAFPKFKKRGQCDSFRYPDRKQIKLDQVNDRIFLPKLGWLRYRNSRDVLGEVRNATVSLSAGRWFVSIQTAREVEQPVPKATSAIGIDLGIARFATMSDGSYLAPLNSFKRHEARLRRAQQAMSRKTRFSNNWKKAKARIQRIHARIGNARRDYLHKATTTISQNHAMVCIEDLQVRNMSRSAAGSADAPGKNVRAKSGLNKAILDQGWFEFRRQLDYKLAWRGGWLIAVPPQNTSRTCPACDHVSAENRQTRARFACVACGFEEHADVVGAINILARGHRVAACGEPVQSGRSVKQEPAEAI

SEQ ID NO: 4677 - protein, 400 aa, unidentified
MQRLQAFKFELMPTGEQQRDMRRVAGSCRFVYNKALALQKENYDAGGKFINYVAMAKHLTAWRNGSETPWLKDSPVHPLQHALKDLERAYKNFFGKRAAFPRLKKKGKSDRFRYPDRKQIKLDQGNSRIFLPKLGWLRYRNSRGVLGELRNATVSRSAGKWFVSIQTQREVDPPVPQATRAVGIDVGVARFATMSDGTFLAPLNSFKQHEARLCRAQRAMSRKMKFSSNWKKAKARIQRIHSRIGNARRDYLHKATTTISNNHAMVCIEDLQVRNMSRSAAGNAENPGKNVRAKSGLNKAILDQGWSEFRRQLDYKLAWNGGWLIAVPPANTSRTCPACGCVSAENRLTQARFACIECGFEENADVVGAINVLARGHRVAACGEPVQSGPSVKQEPAEAI

SEQ ID NO: 4678 - protein, 387 aa, unidentified
MQRLQAFKFELMPSGEQQRQMRRYAGSCRFVYNKALALQKENYDAGGKFIGYVAMAKYLTAWRNEPETPWLKDSPVHTLQHALKDMERAYKNFFAKRAAFPKFKKKGQRDSFRYPDPKQIKLDQDNSRIFLPKLGWLRYRNSRDVLGAVRNATVSQSSGKWFVSIQTEREVEQPIPQATSAIGIDVGIARFATMSDGTYFAPLNSFKRHETRLRRAQRAMSRKTKFSSNWKKAKARIQHIHARIGNARRDYLHKATTTISQNHAMVCIEDLQVRNMSKSAAGNTETPGKNVRAKSGLNKSILDQGWFEFRRQLDYKLAWNGGWLIAVPPANTSRTCPVCGCVNAENRLTQAQFSCIECGFEENADVVGAINVLARGHRVAACGEAAQ

SEQ ID NO: 4679 - protein, 400 aa, unidentified
MQRLQAFQFELMPSGERQRDMRRFAGACRFVFNKALALQKENHEAGGRFIGFVAMAKRLTAWRNGSETPWLKDAPVHPLQHSLKDLERAYQNFFAKRAAFPKFKKRGQRDSFRYPDPKQIKLDQANGRIFLPKLGWLRYRNSRTVQGEVRNATVSLSAGKWFVSIQTEREVEQPVPQASRAVGIDLGVARFATMSDGSYLAPLNSFRRHEARLRRAQRAMSRKTKFSHNWKKAKARLQRIHARIGNARRDYLHKATTTISQNHAMVCIEDLQVRNMSRSAAGSADAPGKNVRAKSGLNKAILDQGWFEFRRQLDYKLAWNGGWLIAVPPQNTSRTCPACDHVSAENRRTQARFACVACGFEESADVVGAINILARGHRVAACGEPAQSGRSVKQEPAEAI

SEQ ID NO: 4680 - protein, 387 aa, unidentified
MQRLQAFKFELMPSGEQQRQMRRYAGSCRFVYNKALALQKENYDAGGKFIGYVAMAKHLTAWRNGPQTPWLKDSPVHTLQHALKDMERAYKNFFAKRAAFPKFKKKGQRDSFRYPDPKQIKLDQANSRIFLPKLGWLRYRNSRDVLGAVRNATVSQSGGKWFVSIQTEREVEQPIPQGTSAIGIDVGIARFATMSDGTYFAALNSFKRHETRLRRAQRAMSRKTKFSSNWRKAKARIQRIHARIGNARRDYLHKATTTISQNHAMVCIEDLQVRNMSKSAAGNTETPGKNVRAKSGLNKSILDQGWFEFRRQLDYKLAWNGGWLIAVPPANTSRRCPACGCVNAENRLTQAQFSCIECGFEENADVVGAINVLARGHRVAACGEAAQ

SEQ ID NO: 4681 - protein, 400 aa, unidentified
MQRFQAFKFKLMPTSEQQRGMRRFAGACRFVFNKALALQRENYEAGGRFIGYVAMAKRLTAWRNGSETPWLKDAPVHPLQHALKDLERAYQNFFAKRAAFPKFKKRGQRDSFRYPDRKQIKLDQANGRIFLPKLGWLRYRNSRDVLGEVRNATVSLSAGKWFVSIQTAREVEQPVPQASSAVGIDLGIARFATMSDGSYLAPLNSFKRHEARLRRAQQAMSRKTKFSNNWKKAKARIQRIHARIGNARRDYLHKATTTISQNHAMVCIEDLQVRNMSRSAAGSRDAPGKNVRAKSGLNKAILDQGWFEFRRQLDYKLAWRGGWLIAVPPQNTSRTCPACDHVSAENRQTQARFACVACGFEENADVVGAINILARGHRVAACGEPARSGRSVKQEPAEAI

SEQ ID NO: 4682 - protein, 400 aa, unidentified
MQRLQAFKFELMPTGEQQRDMRRVAGSCRFVYNKALALQKENYDAGGKFINYVAMAKHLTAWRNGSETPWLKDSPVHPLQHALKDLERAYENFFGKRAAFPRLKKKGKSDRFRYPDRKQIKLDQGNSQIFLPKLGWLRYRNSRGVLGELRNATVSRSAGKWFVSIQTQREVDPPVPQATRAVGIDVGVARFATMSDGTFLAPLNSFKQHEARLCRAQRAMSRKMKFSSNWKKAKARIQRIHSRIGNARRDYLHKATTTISNNHAMVCIEDLQVRNMSRSAAGNAENPGKNVRAKSGLNKAILDQGWSEFRRQLDYKLAWNGGWLIAVPPANTSRTCPACGCVSAENRLTQARFACIECGFEENADVVGAINVLARGHRVAACGEPVQSGPSVKQEPAEAI

SEQ ID NO: 4683 - protein, 400 aa, unidentified
MQRLQAFKFELMPTGEQQRDMRRVAGSCRFVDNKALALQKENYDAGGKFINYVAMAKHLTAWRNGSETPWLKDSPVHPLQHALKDLERAYKNFFGKRAAFPRLKKKGKSDRFRYPDRKQIKLDQGNSRIFLPKLGWLRYRNSRGVLGELRNATVSRSAGKWFVSIQTQREVDPPVPQATRAVGIDVGVARFATMSDGTFLAPLNSFKQHEARLCRAQRAMSRKMKFSSNWKKAKARIQRIHSRIGNARRDYLHKATTTISNNHAMVCIEDLQVRNMSRSAAGNAENPGKNVRAKSGLNKAILDQGWSEFRRQLDYKLAWNGGWLIAVPPANTSRTCPACGCVSAENRLAQARFACIECGFEENADVVGAINVLAREHRVAACGEPVQSGPSVKQEPAEAI

SEQ ID NO: 4684 - protein, 478 aa, unidentified
MIVLAVHLDQLRLEVGADLGEDRAQPVDSVTIEYPAAIFRYKDQMDMHLKNAVSSMPNIVVVAHRPNYNIRMQRLQAFKYELRPDGQQERQMRRFAGSCRFVYNKGLALQKERYERGEKKLGYAGLCKLLTEWRNSAETAWLADAPVHPLQQALKDLERAYSNFFAKRADFPRFKKKGQRDSFRYPDPKQIKLDQGNSRIFLPKLGWLRYRNSREVLGTVRNVTVSQSCGKWFVSIQTEREVEQPVPQATTAVGIDMGVIRFATLSDGTFYAPLNSFKRHETALRKAQQAMSRKTKFSNNWKKAKARVQRIHSRIGNARRDFLHKTSTAISQNHAMVCIEDLQVRNISRSAAGTTEQPGRNVRAKSGLNKSILDQGWFEFRRQLDYKLAWQGGWLVAVPPQNTSRSCPCCGHVSADNRQTQARFACVECGFEENADVVGAINVLRAGHARFACEVSDAVGSPAAGTHRSDSGAAQCHP

SEQ ID NO: 4685 - protein, 489 aa, unidentified
MTKENPSNYKTLQIWIKKGHRMYSYFQECCHNAKNMYNTTNFYIRQVYTGLTQEKELQPLQKEVLDNIHKNIGKMNDTQLLAYQKKLEKENLKPKEEQKEIKCNLFSEPNFEKPYVDYNFLDALFKAMIQNDYRALPTQCSQSIMKCLFQNWKSFFASLKDYKKNPNKYAGMPRIPKYIRSSEKEILYTNQDCIIKNGRFLKFPKTKLQLNIGKLGFTEGKLKQVRVIPKYNEYVVELVIDVPSEQQMIEENARYMSIDLGIDNLATIVTNTGMKPVLVKGKHVKSINQYYNKMRSHFTSILRNGKQTNKGPFTSKRIEKLHQKRYLKIKDVFHKVSHHIVKLAQEEEVCKIVIGQNKSWKQETNMGKRNNQSFCYIPHNLLIQMITYKANAVGIQVVVTEESYTSKASFLDNDFIPTYGENDQNTTFSGKRIERGIYRSANKTLINADVNAAANILRKVIPNAWTNGIEGLGVKQLANVLTPLTLIIH

SEQ ID NO: 4686 - protein, 480 aa, unidentified
MERDGGKEYRTYQMDVKKGHRLFSYFEELCANGNNLYNATNFYIRQVYTALQSDKPLQPLQKEVLETIYRNIDKMNEKKTMAYYKKLQKLKGKENQKELKLFTLPTKEKAFVGYNFLDALFKTIKQKDYYSLPGQINQQVIKNVVQNWDSFFKSLKGYNENPQKYKGRPNIPGYLPKGSQKEVVLSNQICQFKSEKYLRFPKTRGKLNIGKLANVSGKFQQVRIIPKYDTFTVEVIFFLGKKVEINPKKKRILSIDLGVENIATLVSNVEVTPILFKSGKIKSVNRWYNKLKSYYYAALRNGRSSKEGQRYSKRLSKLDSKRHNQIKDFFHKVSFNIVKVAKEHHIDTIIIGKNMDWKQKVALGSKSNQNFVQIPHSMLVSMIRYKANTEGIAVIETEESYTSRASFLDEDPIPTYKSGEKSDGIFSGKRISRGMYRSKKGILINADVNGSANILRKVVPKAFANGIAVVCTQPLAVNVH

SEQ ID NO: 4687 - protein, 480 aa, unidentified
MERDEGKEYRTYQMDVKKGHRLFSYFEELCANGNNLYNLTNFYIRQVYTALKSDKPLQPLQREVLETIYQNIDKMNEKKTMAYYKKLRRLKGKGNQKELKLFTLPTKEKAFVGYNFLDALFKTIKQKDYYSLPGQINQQVIKNVVQNWDSFFKSLNGYKENPQKYKGRPNIPRYLPKGSQKEVVLSNQICQLKSEKYLRFPKTKGKLNIGKLANVSGKFQQVRIIPKYNTFTVEVIFFTGKKIEINPKKKRILSIDLGVENIATLVSNVEMTPILFKGGKIKSINRWYNKLKSYYYAALRNGRSSKEGQRYSKRLSRLDSKRHNQIKDFFHKVSFNIVKVAKEHRIDTIIIGKNMDWKQKVALGSKNNQNFVQIPHAMLVSMIRYKANTEGIAVIETEESYTSQASFLDEDPIPTYKSGEESDDIFSGKRISRGMYRSKKGILINADVNGSANILRKVVPKAFANGIAVVCTQPLAVNVH

SEQ ID NO: 4688 - protein, 402 aa, unidentified
MKRLQAFKFQLRPNGQQERDMRRFAGACRFVFNRALALQNENHEAGNKYIPYTKMTSWLIEWKSIPDTQWLKDAPSQPLQQSLKDLERGYKNFFQKRAAFPRFKKRGQNDAFRYPQGVKLDQTSNRISLPKLGWIRYRNSREVIGEVKNVTVSQSCGKWYVSIQTEYEVADPVHKAASMVGLDAGVTKLATLSDGTVYQPVNSFKASQRKLAMLQRQLSRKVKFSASWQKQKKKIQRLHSHIANIRRDYLHKVTSEISKNHAMIVIEDLKVSNMSKSAKGTAERHGRNVRAKSGLNRSILDQGWYEMRRQLEYKQFWRGGQVLAIPPAYTSQRCACCGHTAKENRQTQSKFVCQVCGYTENADINGARNILAAGHAVLACGGMVQSGRPLKQEPTEVSQALI

SEQ ID NO: 4689 - protein, 402 aa, unidentified
MKRLQAFKFQLRPGGQQECEMRRFAGACRFVFNRALALQNENHEAGNKYIPYGKMASWLVEWKNATETQWLKDAPSQPLQQSLKDLERAYKNFFQKRAAFPRFKKRGQNDAFRYPQGVKLDQENSRIFLPKLGWMRYRNSRQVTGVVKNVTVSQSCGKWYISIQTESEVSTPVHPSASMVGLDAGVAKLATLSDGTVFGPVNSFQKNQKTLARLQRQLSRKVKFSNNWQKQKCKIQRLHSRIANIRRDYLHKVTTTVSKNHAMIVIEDLKVSNMSKSAAGTVSQPGRNVRAKSGLNRTILDQGWYEMRRQLEYKQLWSGGQVLAVPPAYTSQRCACCGHTAKENRLSQSKFRCQVCGYTANADVNGARNILAAGHAVLACGEMVQSGRSLKQEPTEIIQATA

SEQ ID NO: 4690 - protein, 457 aa, unidentified
MGLRVTGGQRRRCFGLLRSAGDVWACVLEVNAWRRRRRDAPLAGFQELCRELAASGPGTFGELDSTGARSVLRRFSDAWFAVAKRRKAGDVSAGFPRRRRGLVPVRWYHGTFTVVGRRVRIPAARGSAPLWVRLVRDVPYPVEQVRSVTLLCEGGRLFLDVTAEVPVTVYPPGEGPDPARTAGVDLGIIHPYAVAGPDGAGLLVSGRAVRAEYRMHLADTKARRRAVARRAPKPGQRGSRRWRRYRRRARMVEGRHRRRVRQAQHEAARTVISWAQQQRVGVLHVGDPRSVLDIPAGRRHNLRLRQWQIGRLIQVLTDKATLAGITVHMVDERGTSSTCPACHRRIPKPPGRTLTCPHCTFTGHRDLVAAAMIATRKPGGGPTTPTTAVAVLPGVITHRRAGRHLPGAGQSRRDPRRPTQAARGSDGPRRPAPPPGEESLAPNGEDPQHPTGRPGER

SEQ ID NO: 4691 - protein, 428 aa, unidentified
MLEVNAWRRRRGDAPLAGYQELCRELAASGPGTFGELDSTGARSVLRRFSDAWFAAAKRRQTGDGAARFPRRRRGLVPVRWYHGTFTVDGRLVRIPTARGSAPLWVRLVRELPYPVEQVRSVTLLCEGGRLFLDVTAEVPVTVYPPGEGPDPARTAGVDLGIIHPYAVAGPDGAGLLVSGRAVRAEYRMHLADTKARRRAVARRAPKPGQRGSRRWRRYRRRARVVEGRHRRRVRQAQHEAARTVISWAQQQRVGVLHVGDPRSVLDIPAGRRHNLRLRQWQIGRLIQVLTDKATLAGITVHLVDERGTSSTCPACHRRIPKPRGRTLTCPHCRFSGHRDLVAAAMIATRRPGGGPTTGTTAVLPGVITHRRAGRHLPGAGQSRRDPRRPPQTARGSDGPRRPAPPPGGESLAPQGEDPQHHRKPGER

SEQ ID NO: 4692 - protein, 456 aa, unidentified
MGLRVTGGQRRRCFGLLRSAGDVWACVLEVNAWRRRRRDAPLAGYQQLCRELAASGPGTFGELDSTGARSVLRRFSDAWFAAAKRRKSGDGAARFPRRRRGLVPVRWYHGTFTVVGRRVRIPAARGSAPLWVRLVRELPYPVEQVRSVTLLCEGGRLFLDVTAEVPVATYPPGEGPDPGRVAGVDLGIIHPYAVAGPDGAGLLVSGRAVRAEYRMHLADTKARRRAVARRAPKPGQRGSRRWRRYRRRARVVEGRHRRRVRQAQHEAARTVISWAQQQRVGVLHVGDPRSVLDIPAGRRHNLRLRQWQIGRLIQVLTDKATLAGITVHLVDERGTSSTCPACHRRIPKPPGRTLTCPHCRFSGHRDLVAAAMIATRRPGGGPTTPTTAVAVLPGVITHRRAGRHLPGAGQSRRDPRRPPGTARGSVGPRWPAPPPGGESLAPHGEDPQHHRKPGER

SEQ ID NO: 4693 - protein, 449 aa, unidentified
MTAGQRRRCFGLLRSAGDVWACVLEVNAWRRRRQDAPLAGYQQLCRELSGPGPGTFGELDSTGARSVLRRFSDAWFAAAKARQDGDLSVRFPRRRRALMPVRWYHGTFTLDGRRVRLPTARGTSPLWVRLAREVPYPVEQVRSVTLLCEGGRLFLDVTAEVPVATYPAGQGPDPDRVAGVDVGIIHPYAVAGPAGEGLLVSGRAIRAEHRMHLADTKTRRRAVARRAPKPGQQGSRRWRKYRRRARLGEGRHRRRVRQAQHEAARTVVSWAVEQRVGVLRVGDPRGVLDIDAGRRHNLRLRQWQIGRLMQVLTDKAVQAGITVDTVNERGTSSTCPACLRRVPKPRGRTLTCPHCKFSGHRDLIAAAIIATRTPGGGPTTPTAAVALPEVVKHRRAGRHLPGASQSRRDPRRPPQAARGSVGPRRPASPPGGESLAQTARIHNGASETR

SEQ ID NO: 4694 - protein, 424 aa, unidentified
MWRRRRDDKPLTGYQELCRELSGSGPGTFGELDTTGARSVLRRFSDAWFAAAKRRRDGDVSARFPRRRRGLVPVRWYHGTFVLDGRRVRIPTAQGAAPLWVRLAREVPYPVEQVRSVTLLCEGGRLFLDVTAEVPVAVYPPGEGPDPGRAAGVDLGIIHPYAVAGPDGEGLLVSGRAIRAEHRMHLADTKARRRSVSQRAPKPGQKGSRRWRKYRRRARLVEGRHKRRVRQAQHEAAAMVVSWAVEQRIGVLKVGDPRGVLDLDAGRRHNLRLRQWQIGRLRQVLEDKATQAGIVVDPVNERGTSSTCPACLRRVPKPRGRTLTCPHCQFTGHRDLIAAAIIATRTPGGGPTTPTAPVVLPEVVTHRRAGRHLPGAGQSRRDPRRPPAAARGSVGPRRPAPPPPGDGESLAHTARIHNRASETR

SEQ ID NO: 4695 - protein, 428 aa, unidentified
MLEVNAWRRRRGDAPLVGYQQLCRELSASGPGTFAELDSTGARSVLRRFSDAWFAAAKRRTAGEPSARFPRRRRGLVPVRWYHGTFTLDGRRVRIPTAKGSAPLWVRLAREVPYPAEQVRSITLLREGGRLFLDVTAEVPVAVYPPGEQPDPGRVAGVDLGIIHPYAVAGPDGEGLLVSGRAIRAEHRMHLADTKGRRRAVARRAPKPGQKGSRRWRQYRRRARLVQGRHRRRVRQAQHEAARTVVSWAVRQRVGVLHVGDPRGVLDIPAGRRHNLRLRQWQIGRLLQVLTDKATLAGITVRLVDERGTSSTCPACHQRVPKPRGRTLSCPHCAFSGHRDLVAAASIATRIPGSGSTTPAAVVLPEVVTHRRAGRHLPGAGRSRRDPRRPPRAARGSVGPRRPAPPPGGESLAHTARIHNTHRKPGER

SEQ ID NO: 4696 - protein, 432 aa, unidentified
MWACVLEVNAWRRRRHDAPLVGYQELCRELAASGPGTFADLDSTGARSVLRRFSDAWFAAAKRRTAGDLSARFPRRRRALVPVRWYHGTFTLDGRRVRIPTAKGGAPLWVRLAREVPYPAEQVRSITLLREGGRLFLDVTAEVPVAVYPPGEQPDPGRVAGVDLGIIHPYAVAGPDGEGLLVSGRAIRAEHRMHLADTKGRRRAVARRAPKPGQKGSRRWRQYRRRARLVQGRHRRRVRQAQHEAARTVVSWAVRQRVGVLHVGDPRGVLDIPAGRRHNLRLRQWQIGRLLQVLTDKATLAGITVRLVDERGTSSTCPACHRRVPKPRGRTLSCPHCAFSGHRDLVAAASIATRVPGGGSTTPTAVVLPEVVTHRRAGRHLPGAGRSRRDPRRPPGAARGSVGPRRPAPPPGGESLAHTARIHDTHRKPGER

SEQ ID NO: 4697 - protein, 460 aa, unidentified
MHRTAFVGLRLTPGQRRRCFGLLRSAGDVWACVLEVNAWRRRRHDAPLVGYQQLCGELAASGPGTFAELDTTGARSVLRRFSDAWFAAAKRRKDGDVSARFPRRRRALVPVRWYHGTFTLDGLRVRIRTAKGTSPLWVRLAREVPYPVEQVRSVTLRCEGGRLFLDVTAEVPVAVYPPGEEPDPGRVAGVDLGIIHPYAVAGPDGEGLLVSGRAIRAEHRMHLADTKSRHRAVSRRAPKPGQKGSRRWRQYRRRARLVQGRHRRRVRQAQHEAARTVVSWAVRQRVGVLHVGDPRGVLDIPAGRRHNLRLRQWQIGRLLQVLTDKATLAGISVRLVDERGTSSTCPACHRRVPKPRGRTLSCPHCAFSGHRDLVAAASIATRVPGGGSTTPAAVVLPEVVTHRRAGRHLPGAGRSRRDPRRPPGAARGSVGPRRPAPPPGGESLAPTARIHDTHRKPGER

SEQ ID NO: 4698 - protein, 460 aa, unidentified
MHRTARVGLRLTPGQRRRCFGLLRSAGDVWACVLEVNAWRRRRHDAPLVGYQQLCGELAASGPGTFADLDSVGARSVLRRFSDAWFAAAKRRSAGDLSARFPRRRRALLPVRWYHGTFTLDGHRVRIPTARGTSPLWIRLAREVSYPVEQVRSVTLRCEGGRLFLDVTAEVPVAVYPPGEEPDPGRVAGVDLGIIHPYAVAGPGGEGLLVSGRAIRAEHRMHLADTKSRHRAVSRRAPKPGQKGSRRWRQYRRRARLVQGRHRRRVRQAQHEAARTVVSWAVRQRVGVLHVGDPRGVLDLPAGRRHNLRLRQWQIGRLIQVLTDKATLAGITVRLVDERGTSSTCPACHRRVPKPRGRTLSCPHCAFSGHRDLVAAASIATRVPGGGSTTPAAVVLPEVVTHRRAGRHLPGAGRSRRDPRRPPRAARGSVGPRRPAPPPGGESLAHTARIHDTHRKPGER

SEQ ID NO: 4699 - protein, 452 aa, unidentified
MRVTLGQRRRCFGLLRSAGDVWACVLEVNAWRRRRRDVPLSGYQELCRELAASGPGTFAELDSTGARSVLRRFSDAWFAAAKRRSAGDMLARFPRRRRGLVPVRWYHGTFTLDGRRLRIPTAKGSAPLWVRLAREVPYPVEQVRSVTLLCEGGRLFLDVTAEVPVAVYPPGEQPDPARVAGVDLGIIHPYAVAGPDGKGLLVSGRAIRAEHRMHLADTKARRRAVARRAPKPGEKGSRPWRQYRRRARLVEGRHRRRVRQAQHEAARSVVSWAVEQRVGVLHVGDPRGVLDLPAGRRHNLRLRQWQIGRLLQVLTDKAVLAGIVVRLVDERGTSSTCPTCRRRVPKPRGRTLSCPHCRFSGHRDLVAAASIATRTPGGGPTTPTAVALPEVVTHRRAGRHLPGTGRSRRDPRRPPRAARGSVGPRRPAPPPGGESLAPTARIHNTHRKPGER

SEQ ID NO: 4700 - protein, 460 aa, unidentified
MVHRTARVGLRLTRAQRQRCFGLLRAAGDLWACVLEYNSWRHRRQDRPVASYQELCRLLAASGPGTFGELDSTGARSVLRRYSDAWFSAAARRRAGHGEVRYPRRRRSLMPVRWYHGTFGLSEQRLRLPTSAGSPPLVVRLDRAVPYPHDAVRSVTLVFDQGRLWVEVTAELPVATYPAGQEPERGRVAGVDLGIIHPYAVAAGDGQMLLVSGRAIRAEHRQHLADTKGRRRATAARAPKRGQRGSRRWRKTRRRARLMEGRHRRRVRQAGHEAAKTVIGWAVQHRVGTLTVGDPRGVLDLPAGRRHNLRLRQWQLGRAIAVLKDKAELAGITVYLVDERGTSSTCPVCRRRVVKPRGRTMMCRSCGFVGHRDVAAAFTIATRTPGGVTTTAPDVGAVITHRRAGRHLPGAGLSRRDPRRPPAVSGSVGRLRPAPLPVGSRSLRQRLGEEPQHHRQPGER

SEQ ID NO: 4701 - protein, 553 aa, unidentified
MHTISIFVDQNRMPKLASYFECQTHLAKNLRNSANFILHNLRTGLKKAPVDRTSNENEVIKTVRIGIEMANEKLQKDVDRLTKQLQSLPASDPARTKIQKRIDNKQKNHPIMPTSDHWMLTYETLDAVMKNTKNPDYYAMPSQANQQVLRKVLKDWKSHFELLASYRQNPGKFKAQPKQPGYIRTPYTTVTFTNQVAKRSDIKGKMHITFPRCLVPLCVGKPEGSYVRTEVKPCYGGYMVYVTFQDAVKMPEAPTNPTRILGLDPGLDNFLTALTNFPAAPFIIDGHWLKSINQNFNRRRAALMSELTKGMDSTKSVKNSARLNRISKKRACRIDDFFYKAAHYIVDFCLKNKVEVIVCGHNKDQKQEINLGSCNNQHFVSIPYTRFFWILTCVAAKAGIPVIETEESYTSKASLIDKDPIPVYKEGDRLEYHFSGKRISRGQYESKEGTILNADVNGAGNIIRKVYPNAFDGVTDFSYTNKTVIRVTREVLCHAKHKKKHARPQRKCGMNRWLHHRRQEQKLVYFALFKVSSAKDKTKYIEESKQTAAKETA

SEQ ID NO: 4702 - protein, 553 aa, unidentified
MHTISIFVDKNRMPKPASYFECQTHLAKNLRNAANFIIRNLRTGLKKAPDTRTANENEVLETVRIGIEMANEKLLKDVDRLTKQLQKLPADDPARTKIQKRIENKQKNHPSMPTSDHWMLTYETLDAVMKNTKNPDYYAMPSQVNQQVLRKVLKDWKSYFEALASYRQNLEKFKSQPKQPRYIKTPYTTVTFTNQVAKRSDIRGKMYITFPRCLVPVCVGKPEGSYVRTEVKPCYGGYMIYVTFQDAVKTPEAPKNPTRILGLDPGLDNFLTALTNFPEAPFILDGHWLKSINQNFNRKRAVLMSELTRGLDSTKSVKNSARLNRISKNRACQIEDFFYKAAHYIVDFCLKNKVEVIVCGHNKDQKQGINIGAGNNQHFVSIPYARFFWILTCVAAKAGIPVIETEESFTSRASLIDNDPLPVYKEGKDAAYRFSGKRISRGQYESKNGTILNADVNGAGNIIRKIYPNAFDEVKDFSYTNKTVIRVTREALCLVKHKEKHAGPRRKSGMNRWLHHRRQEQKLVYFELFKASSARDKTRYIEESKQKAAQKTA

SEQ ID NO: 4703 - protein, 506 aa, unidentified
MYCAYKIQIHSDHELFEYCDSLCFKAKNLYNITNYYVRQVYTALKAEKKNENQLQVLRDIETHLPIMNEIRKKHYEKELVKPKKVDKKGKEIEPKLKLFKMPTKDQSFIGYSFVEALFKVMKQIDYTSMPSQSNQQTMKKVFNDWKSFFKASKKYKINPSCFSGKPKIPKYKSKTGRTTCYLTNQITEIKEGNVLKLPGTSLQLKLGKVALSEGKLQQVRIVPSYGRYVMELVFKAEQQEKVIVRTAEQINKFIFEPKKVMGIDLGVDNLATIVDNLGLKPLLIKGTWLKSINQYYNKLRANYMSIIRNGKSPKEGVFTTNRLVALDRKRNNRVMDFLHKASVKVVTIALERDIDTIIIGKNSGWKLDVNMRKSTKQTFIQIPYTTLIDMIRYKAERKGIQVIIREESYTSKSCFLTKDPIPTFGEEHQTTFSGQRVKRAFYKITGSKIQIHADVNGAFNIVRKHVGGAFEGLDKKQFLQSPKKIIILKSRKTAKRKKKAKLKASA

SEQ ID NO: 4704 - protein, 506 aa, unidentified
MYSAYKIQIHSDHELFEYCDSLCFKAKNLYNITNYYVRQVYTALNAEKKNENQQQVLMDIETYLPIMNEIRQKHYEKEMVKPKKVDKKGKEIEPKLKLFKMPTKDQSFIGYSFVEALFKVMKQVDYTSMPSQSNQQTMKKVFDDWKSFFKASKKYKINPSCFPGKPKIPKYKSKTSRTTCYLTNQITEIKEGNVLKLPGTRFQLKLGKVALSEGKLQQVRIVPSYGQYVVEVVFKAEPQEKAILRTEEQINKFIFEPKKVMGIDLGVDNLATIVDNTGLKPLLIKGTWLKSINQYYNKLRANYMSIIRNGKSPKEGVFTTNRLVALDRKRNNRVQDFLHKASVKVVTIALERDIDTIIIGKNSGWKLDVNMRRSTKQTFIQIPYTTFIDMIRYKAERKGIQVIIREESYTSKSCFITKDPIPTFGEEHQTTFSGQRVKRAFYKITGSNIQIHADVNGAFNIVRKHVSGAFEGLDRKQFLQSPKKIIILKSKKKAKRKKKAKLKASA

SEQ ID NO: 4705 - protein, 479 aa, unidentified
MENEYRTYQIIIKKGHKLYPYFANLCSNGKNLYNTTNFYIRQVYTALKQEKEWQPLQQEVMATISNNIDKMNENQRKCWEKKMKKEMAKPEEERKEIKLNLFDLPTKEHSFLGYNFLDCLFKTMKQQDYCSLPGQINQQVIRNVIQNWQSFFESLQDYKLNPEKYKGRPKIPRYLAKDGQKEITLSNQICKMVDGKYLRFPKTKSRMNTGKLASNNGKLQQVRVVPKYGQYVVEIIYLLGEKKEINAKLESCMGIDLGLNNIATIVTNTGITPVLFNGGRIKSINQWYNKLRAYYYAVLRNGKNTNIGAYYSKRLLKLDSKRNNQIKDLFHKISCNIIKMAKENEIDTIIIGKNAGWKQEVNLGKRNNQNFVQVPHSILIKLLMYKAHAEGISVMITEESYTSKASFLDEDFIPTYKVGDEQHVFSGKRIYRGLYRSQNHILIHADVNAACNIVRKVVPKAFANGIAAVCSQPHVVNVH

SEQ ID NO: 4706 - protein, 496 aa, unidentified
MYRSYKIQIHSEHELFDYCDSLCFKAKNLYNITNYYIRQVYTALKKETRNENQLQVLTDIQDHLPQMNKIRQKSFERAKSKPKKVDHNGHVLKPKPKIFEMPHPEKAFLPYNFVEALFKVMKQTDYISMPSQSNQQTMKKVYDDWKSFFEASKKYKTKPTSFSGKPKIPKYKQKNGRITCYLTNQITKIKSGDTLSLPGTPLTLKLGKIAHIDGKLQQVRIVPSYSRYVMEVVFKSEVEKEIKRSEKQVNEWVFEPKRVMGIDLGVDNLATIIDNTGLMPLLIKGKWLKSINQYYNKLRAKYMSILRNGKGPKEGKFNTTRLISLDRKRNNRVMDFLHKASVKVVEIAQERIIDTIIIGKNEGWKMEVDMQKTNKQTFIQIPYATFISMIRYKAERYGIQVIVREESYTSKSSFLNHDPIPTYGEEYHINFSGYRRSRSFYKIKGSKILIHADVNGAFNIVRKHTKDVFEGLERKQFLQSPRKIIIIKKRKAKLKA

SEQ ID NO: 4707 - protein, 461 aa, unidentified
MVHRTARVALRVTPGQRRRCFGLLRSAGDVWACVLEVNAWRRRRHDSPLVGYQELCRELAASGPGTFAELDTTGARSVLRRFSDAWFGAAKRRKAGDLSARFPRRRRGLLPVRWYHGTFTLDGRRVRIPTAKGTSQLWVRLARDLPYPVEQVRSITLLSEAGRLFLDVTAEVPITVYPAGEEPDPGRVAGVDLGVIHPYAVAGPDGEGLLVSGRAIRAEHRMHLADTKARRRAVARRAPKPGEKGSRRWRKYRRRARLVEGRHRRRIRQAQHEAARTVISWAVRQRIGVLHVGDPRGVLDLPAGRRHNLRLRQWQIGRLIQVLTDKATLAGITVRLVDERGTSSTCPTCGRRVPKPRGRTLSCPHCHFSGHRDLVAAASIATRTPGGGPTTETAVVLPQVVTHRRAGRHLPGTGRSRRDPRRPPRTARGSVGPRRPAPPPGGESLAHTARIHNRHRTSGER

SEQ ID NO: 4708 - protein, 489 aa, unidentified
MTKENPSNYKTLQIWIKKGHRMYSYFQECCHNAKNMYNTTNFYIRQVYTGLTQEKELQPLQKEVLDHIHKNIGKMNDTQRLAYQKKLEKEKLNPKEEQKEITCNLFSEPNFEKPYVDYNFLDALFKAMIQNDYRALPTQCSQSIMKGLFQNWKSFFASLKDYKKNPNKYAGPPRIPKYIRSSEKEILYTNQDCIIKNDRFLKFPKTKLQLNIGKLGFTEGKLKQVRVIPKYNEYVVELVIDVPSEQQMIEENARYMSIDLGIDNLATIVTNTGMKPVLVKGKHVKSINQYYNKMKSHFTSVLRNGKQTNEGPFTSKRIEKLHQKRYLKIKDVFHKVSHHIVKLAQEEEVCKIVIGQNKSWKQETNMGKRNNQTFCHIPHSLLIQMITYKANAVGIQVVVTEESYTSKASFLDNDFIPTYGENDQNTTFSGKRIERGIYRSANKTLINADVNAAANILRKVIPNAWTNGIEGLGVKQLANVLTPLTLIVR

SEQ ID NO: 4709 - protein, 408 aa, unidentified
MKLSLKYYPRWKKEQLQIIEELSFHTTKLYNIANHQCREKYKSYRVLEKELKQNWHKPYLHSHTYQQLLKVLEQNWKSYFSSLKDYKQNPSKYKAMPQPPKYKHIHKRKNEIIFTNLAIRRKDGHILLSLSKTMQKAFKVDSLKVEEPKTLPLPEHAHIQQIRLQYDQNWHLLIIYNIPAKAQSTSKNIMAIDLGLSNLSAITFSHSKDNYIIDGKSLKSINGYINKKIAHLQSIRMKQTSAKAYKTTKQIKRLRKKRHDYITNYLHQASRTIINLAQQYDIGTIVIGDIKRIKQHSTLKTFVQIPIERFTKMIQYKAELAGIKITYQKETYTSGVSAIDLEPITKTYYNKTRRVCRGLFRTNQGIYVNADINGSLNILRKTYTGTPNLITSVRDNGCVNHPQRIRVA

SEQ ID NO: 4710 - protein, 417 aa, unidentified
MADQVTRTYVASIRNHQQVRADLDSLGFAASKLWNVARWTCDRIWDETGTIPDDGVLKAYLKNHERYADLNAQSSQEILEELAEAFDSWYTLRGNGDEKANPPGYRKHGDEHPRSTVTFKEDGFEHDLEHNQIRLSKGRNLKDGRQDFILCEYAADPDVAIKNVQQVRAVWTDTEWELHIVCNVEIGDPDPPGDRVAGIDLGICNFAAVAVGDDALLYPGGALKEDEYYFLKERAKCDDSDSQKARRLDRKRDERRTHFFHAVSKDIVAECAARNVGKIAAGDLTGIREDADWGDHGNLDLHGWAFDRFTEMLEYKAAEHGISVERVDERDTSKSCASCGTTEDSQRVERGLYVCEECGLVANADVNGAENIRQKVLPTLACDGGDRDNGWMAQPAVRLFEKSTGRVAPQEQVCREP

SEQ ID NO: 4711 - protein, 422 aa, unidentified
MLETTRTYRAKIVNQTQVSDDLDDCGHSASKLWNVARYHTQQEWDETGNIPSEADLKRELKDHERYSDLHSQSSQRVLEELAESFNGWFKKRKNGDTDANPPGYRKRGDNHPRTTVTWKQNGIKHDSKHNKLRLSKGFNLKNHRSDFILVEYETRPDVTVENIQQVRAVWNGDQWELHLVCNVEIPVEDAPGDNTAGIDLGIKNYLAIAYDNGDAELYPGNVLKQDKHYFTRDEYDTEGENGPSRRALRARQKLSRRKDHFLHALAKHIVEQCIDHEVEHIVIGDLSKIREDENGDARNWGKRGNKKLHGWEFDRFTDLLEYKAEEHGILVDRKSERDTSKTCSCCGRKLNANRVERGLYVCESCGVTMNADINGAVNIRRKITQNPPTGDMSNGRLARPVAYLFNQTSGRFAPSERVGCKP

SEQ ID NO: 4712 - protein, 412 aa, unidentified
MRIVFEDGTLLLENAPESVPYAEWDDRVRNIEHKRIITRPCERGRRSTVGTKRHFTNRTRLLKRLKIQRAPTAISICRLPLRSNPAITNKPPGYRKRGDRHPRSTVTWKQNGIKHDDKHGQLRLSKGWNLKDGRSDFILVEYETRPDVTVENIQQVRAVWTGDRWELHLVCETVIPVEDAPGDNTAGIDLGISNYLAIDYEDGPSELYPGNRLKQDKHYFTRDEYQIEGENGPSKRARRARRKLSRRKDHFLHTLSKHIVERCIEEEIGTIAVGDLSDIREDDDGDSRDWGQRGNKKLHGWEFDRFTRLLEYKAEAYGILVDRVDEENTSKTCSCCGQIRDANRVERGLYVCNSCATTMNADVNGAVNIRRKITQTPPTGDMSNGCLARPGVYLFDTTTGAFHPQEQADCKP

SEQ ID NO: 4713 - protein, 422 aa, unidentified
MLETTRTYRAKIVNHSQVSDDLDDCGHSASKLWNVARYHTQQEWDETGEIPSEADLKRELKDHERYSDLHSQSSQRVLEELAESFNGWFKKREKGDTDANPPGYRKHGDKHPRSTVTWKQNGIKHDSKHNKLRLSKGFNLKNHRSDFILVKYETRPDVVVKNIQQVRAVWNGDRWELHLVCKVEILTEDAPGDNTAGIDLGIKNYLAIAYDDGDAELYPGNVLKQDKHYFTRDEYDTEGENGPSKRALRARQKLSRRKNHFLHALAKHVVEQCIDHEVGRIAIGDLSRIREDENGESRNWGKRGNKKLHGWEFDRFTTLLEYKAEEHGILVDRKSEQDTSKTCSCCGRKRDANRVERGLYVCEPCGVTMNADVNGAVNIRRKITQNPPMGDMSNGRLARPVAYLFNQTSGRFAPGEQADCEP

SEQ ID NO: 4714 - protein, 424 aa, unidentified
MSRTIRTFEATITNQRQVRDDLDQLGWAASKLWNVSRYYAQEQWDETGEIPDDGKLKAELKSHERYTDLHSQSSQRVLEELAEAFNGWYGKRRNGDDRARPPGYRKNGDSHPRSTVSFKAAGFKHDAQFTRVRLSKGRNLKEHRSDFILCEYQTRPDVDLTEWDIQQVRAVYKRDEWRLQFVCRTTIDPEPPGNGVAGVDLGICNFAAVSFGGESVLYPGGALKEDEYYFTKKKAKCDDSSSREAIRLDRKRTGRRTHFLHALSKAIVEECVERGVGTLVVGDLGGIRDDDENGEARNWGDHGNLDLHGWAFDRFTTLLDYKAESEGIDVESVSERNTSKSCSSCGRTDDNQRVERGLYVCEKCDTVANADVNGAENIRQKVLPSLATDGGDRDNGWLAQPAVHLFDRSEGRFAPREQVVNREP

SEQ ID NO: 4715 - protein, 402 aa, unidentified
MKRLQAFKFQLRPNGQQERDMRRFAGACRFVFNRALALQNENHEAGNKYIPYTKMASWLIEWKSHPDTQWLKDAPSQPLQQSLKDLERGYKNFFRKRAAFPRFKKRGQNDAFRYPQGVKLDQANNRISLPKLGWVRYRNSREVIGEVKNVTVSLSCGKWYVSIQTEYEVADPVHNAESMVGLDAGVTKLATLSDGTVYHPANSFKANQRKLAMLQRQLSRKEKFSANWQKQKRKIQRHHSHIANIRRDYLHKVTSEISKNHAMIVIEDLKVSNMSKSAKGTSEQHGRNVRAKSGLNRSILDQGWYEMRRQLEYKQLWRGGQVLAIPPAYTSQRCACCGHTAKENRLSQSRFECLECGYTENADVNGARNILAAGHAVLACGGMVQSGHLLKQEPTEASQAPV

SEQ ID NO: 4716 - protein, 411 aa, unidentified
MQTLTAKAKVVNLCDRDALLLGLLGFAATKLWNGANHHRRSVWNETGKIPGFAEQCRELKANRWYKLLPSQSSQEILGEQDDSYRSWFSHRKNGNKNAHPPGFRKKDSLSTVTFKQNAFEMLPGNRVKLKLPKTYARQEILLEYQLPPDVTLGKVQQVKLVYEPKTGDWYLHITHKVMIKYSEIGNIMSLDLGIVNIIAGLITDGFSFIVPGGELLALDRYFQKEKAKCTKSTSRKCVRLNAKWGRQRSHYLHVLTKWLVNLAIAHDVSTILVGELKGIRAGKDWGDVGNQKLHAWPFSKIISLLTYKAALAGIRVIKVSEKSTSTTCPVCSRRTKKARVYRGLFVHCGLALNADLVGAYNILQRYLREAGLTLPDRPGVVGALARPAVNLFVWRKTTPEGREQGTFKQAA

SEQ ID NO: 4717 - protein, 419 aa, unidentified
MSRTIRTFEATIPNQQQVRDDLDQLGWAASKLWNVGRYYAQEQWDETGEIPDDGELKAELKGHERYTDLHSQSSQRVLEELAEAFNGWFGKRRNGDDRARPPGYRKNGDSHPRSTVSFKAAGFKHDAQFTRVRLSKGRNLKEHRSDFILCEYQTRPGVDLTEWDIQQVRAVYKRDEWRLQFVCRTTIDPEPPGDGVAGVDLGICNFAAVSFGGESVLYPGGALKEDEYYFSKKKAKCDDSSSREATRLDRKRTGRRTHFLHALSKATVKECVERGVGTLVVGDLGGIREDDENGESRNWGDHGNLDLHGWAFDRFTTLLDYKAEAEGIDVELVSERDTSKSCSACGHTDDTQRVERGLYVCEKCDTVANADVNGAENIRQKVLPSLATDGGDRDNGWLAQPAVHLFDRSEGVFAPREQL

SEQ ID NO: 4718 - protein, 400 aa, unidentified
MQRLQAFKFELMPNGEQQRNMRRFAGACRFVFNQALALQKENYEACGKFIGYVAMAKHLTAWRNGTKTPWLKDAPVHPLQHALKDLERAYRNFFAKRAAFPRFKKKGHGDSFRYPDSKQIKLDQVNNRIFLPKLGWLRYRNSRNVLGEVRNATVSRNAGKWFVSIQSAREVEQPVPQATSAIGIDMGIARFATMSDGSFLAPLNSFRRHEAKLRGAQREMSRKVKFSRNWKKAKARIQRIHARIGNARRDYLHKASTTISQNHAMVCIEDLQVRNMSRSAAGSPDAPGKNVRAKSGLNKAILDQGWFEFRRQLDYKLGWNGSWLVAVPPANTSRTCPACESVNAENRQTQAAFRCVGCGHEDHADVVGAINILARGHRVAACGEPVQSGRSVKQEPAEAI

SEQ ID NO: 4719 - protein, 427 aa, unidentified
MIELARKKKSSSNVPMQTLTARIKVLNLSDQDALLLGLLGFFATKLWNVANHHRCIVWDETGKIPGFAEQCRELKGNRWYKLLPSQSAQEVLGEQDDSYRSWYSHRKNGDKKARPPGFRKKDMLSTVTFKQKAFEILPDNRAKLKLPKTYGRWEIILEYQLPPDTALGKVQQVKLVYKHKTGDWYLHITHKVPIKYRETGNIMSLDLGIVNIVAGLITDGFSFTVPGGELLAIDRYFQKEKAKCTKSTSKKCVELNVKWGRQHNHYLHVLTKWLVNLAITHNVFTIAVGELKGIRTDKNWGDVGNQKLHAWPFSKIISLLTYKAALAGIRVVKVSEKNTSTTCPVCSKRVKKARVHRGLFIHCKQAFNADLVGAYNILRRYLRETGLGSCLDWSGVVGALARPAVNLFVWRKTTPLGRGQGTFKQAS

SEQ ID NO: 4720 - protein, 430 aa, unidentified
MKRKKKKYDELGQLIVEEHEEPYQLLTTKAKIINLSNQDALLLGLAGYAATKMWNVANHERRTVWQETGKIPGFPEQCKALKTNRWYKLLPSQTAQEILAELDDSYRSWYSHRKNGNKLAKPPGFRKKDTLSTLTFKQNAFAMPDIGQIVLKLPRTYARRVVTLEYKLPPETTLGKVQQVKLSYEHKTGSWYLLIYHKVKVNYLPLQNIMALDLGIVNIITGYITNGKSFIFPGGELLALDRYFNKMKAKTNSTKSRKCRFLNRKWSRQRNHFLHVLTKRVIDQAEANNVSHIIVGELKGIRLNKNWGAKQNQELHTWPYRRIIQMLRYKAALRGILVEEVSERNTSTTCPLCSKRVKSARVERGLFVHCGKAFNADVVGAFNILQKYLRDNGLPLLEVVGALARPVVNLFVWRKTTPLGREQGTFKLAA

SEQ ID NO: 4721 - protein, 402 aa, unidentified
MKRLQAFKFQLRPGGQQEREMRRFAGACRFVFNRALALQNENHEAGNKYIPYGKMASWLVEWKNATETQWLKDAPSQPLQQSLKDLERAYKNFFRKRAAFPRFKKRGQNDAFRYPQGVKLDQENSRIFLPKLGWMRYRNSRQVTGVVKNVTVSQSCGKWYISIQTESEVSTPVHPSALMVGLDAGVAKLATLSDGTVFEPVNSFQKNQKKLARLQRQLSRKVKFSNNWQKQKRKIQRLHSCTANICRDYLHKVTTTVSKNHAMIVIEDLKVSNMSKSAAGTVSQPGRNVRAKSGLNRSILDQGWYEMRRQLEYKQLWRGGQVLAVPPAYTSQRCACCGHTAKENRLSQSKFRCQVCGYTANADVNGARNILAAGHAVLACGEMVQSGRSLKQEPTEMIQATA

SEQ ID NO: 4722 - protein, 422 aa, unidentified
MLETTRTYRAKIVNHSQVSDNLDDCGHSASKLWNVARYHTQQEWDETGEIPSEADLKRELKDHERYSDLHSQSSQRVLEELAESFNGWFKKRKNGDTDANPPGYRKRGDNHPRSTVTWKQNGIKHDSKHNKLRLSKGFNLKQHRSDFILVEYETRSDVTVENIQQVRAVWNGDRWELHLVCNVEIPVEDAPGDNTAGIDLGIKNYLTIAYDDGDAELYPGNVLKQDKHYFTRDEYDTEGENGPSRRALRARQKLSRRKNHFLNALAKHIVKRCIDHEIGRIAIGDLSKIREGENGDSRNWGKRGNKKLHGWEFDRFTTLLEYKAEEHGILVDRKSERDTSKTCSCCGRKRDANRVERGLYVCESCGATMNADVNGAVNIRRKITQNPPTEDMSNGRLARPVAYLFNQTSGRFAPGGQLSCKP

SEQ ID NO: 4723 - protein, 422 aa, unidentified
MRTVRTFEATLTNQQQVSDDLDQLGWAASKLWNVGRYYAQERWDAAGEIPDDGELKAELKGHERYTDLHSQSSQRVLEELAEAFTGWLGKRRNGDSRCRPPGFRKQGDSHPRSTVSFKAAGFKHDAQYQRVRLSKGRNLKEHRSDFILCEYQTRPDVDLTEWDIQQVRAVHKRDEWRLQFVCRTTIDPNPPGDETAGIDLGICNFVALSFGGESILFPGNVLKEDEYYFGKEKAKCDDSQSRKRMRIDRKRTDRRSHFLHTLTKHIVSECVERCVGTIVVGDLDGIRNDENGDSRNWGKHGNLDLHGWAFDRFTKLLEYKAEAEGIEVTLVSERNTSKSCSVCGTVDGDQRVERGLYVCDECEVAMNADVNGAENIRQKVTPSLVCDGGDRSTGWLAQPAVHLFDRSEGCFAPREQVGNREP

SEQ ID NO: 4724 - protein, 387 aa, unidentified
MQRLQAFKFELMPSGEQQRQMRRYAGSCRFVYNKALALQKENYDAGGKFIGYVAMAKHLTAWRNGPQTPWLKDSPVHTLQHALKDMERAYKNFFAKRAAFPKFKKKGQRDSFRYPDPKQIKLDQANSRIFLPKLGWLRYRNSRDVLGAVRNATVSQSGGKWFVSIQTEREVEQPIPQGTSAIGIDVGIARFATMSDGTYFAALNSFKRHETRLRRAQRAMSRKTKFSSNWKKAKARIQRIHARIGNARRDYLHKATTTISQNHAMVCIEDLQVRNMSKSAAGNTETPGKNVRAKSGLNKSILDQGWFEFRRQLDYKLAWNGGWLIAVPPANTSRRCPVCGCVNAENRLTQAQFSCVECGFEENADVVGAINVLAWGHRVAACGEAAQ

SEQ ID NO: 4725 - protein, 479 aa, unidentified
MAVYRTLQIWVKKGHRMHPYFQNMCQNAKNMYNITNFYIRQIFTGLKQEKELQPLQKEVLESLQTHLPAINANQLQAYQKRSAKEQKKAKSEQKEIKCHLFEMPSKDKPSIHYPLLDALFKSMKQIDYQSLPIQSSQGIMRTVFQNWKAFYGSLREYKKNPIKFSARPNIPSYCRLKEKEVIFSNQNCVVKDNKFLKFPKTKLCLNIGKLGYSEGKLKQVRVIPKYSHYVVELVFQVPIEVEKKESKNRLLAVDLGIDNLATIVTNTGKRAVLVKGKNVKSVNQRFNQLKAYYTGILRQGKQGNEGTFTSKRLEQISHKRFLQIKDLFHKASFQIVKIALEEDIDTIIIGQNKDWKQYATMGKRNNQSFTSLPHTLLIQMITYKAEKQGITVLLTEESYTSKASFLDNDDIPVYGQKNKNAVFSGKRIKRGLYLSKKCERINADVNGAANIMRKVFKDAFHHSFSSIEALQRPLSLTIK

SEQ ID NO: 4726 - protein, 442 aa, unidentified
MVKNLALVFGDKDQVNMHQENTVPSASDISFFHRPKYNLPCETTTAFTFRLRPGGQQEREMRRFAGACRFVFNRALALQNENHEAGNKYIPYGKMASWLVEWKNATETQWLKDSPSQPLQQSLKDLERAYKNFFQKRAAFPRFKKRGQNDAFRYPQGVKLDQENSRIFLPKLGWMRYRNSRQVTGVVKNVTVSQSCGKWYISIQTESEVSTPVHPSASMVGLDAGVAKLATLSDGTVFEPVNSFQKNQKTLARLQRQLSRKVKFSNNWQKQKRKIQRLHSCIANIRRDYLHKVTTTVSKNHAMIVIEDLKVSNMSKSAAGTVSQPGRNVRAKSGLNRTILDQGWYEMRRQLEYKQLWRGGQVLAVPPAYTSQRCACCGHTAKENRLSQSQFRCQVCGYTANADVNGARNILAAGHAVLACGEMVQSGRPLKQEPTEMIQATA

SEQ ID NO: 4727 - protein, 489 aa, unidentified
MAKENPSNYKTLQIWIKKGHRMYSYFQECCHNAKNMYNTTNFYIRQVYTGLTQEKELQPLQKEVLANIHKNIGKMNDTQLLAYQKKLEKEKLKPKEEQKEITCNLFSEPNFEKPYVDYNFLDALFKAMIQNDYRALPTQCSQSIMKGVFQNWKSFFASLKDYKKNPNKYAGPPRIPKYIRSSEKEILYTNQDCIIKNDRFLKFPKTKLKLNIGKLGFTEGKLKQVRVIPKYNEYVVELVIDVPYEQQMIEENARYMSIDLGIDNLATIVTNTGMKPVLVKGKHVKSINQYYNKMKSHFTSILRNGKQTNEGPFTSKRIEKLHQKRYLKIKDVFHKVSHHIVKLAQEEEVCKIVIGQNKGWKQETNMGKRNNQSFCHIPHNLLIQMITYKANAVGIQVVVTEESYTSKTSFLDNDFIPTYGENDQNTTFSGKRIKRGIYRSANKTLIHADVNAAANILRKVIPNAWTNGIEGLGVKQLANVLTPLTLIVR

SEQ ID NO: 4728 - protein, 489 aa, unidentified
MTKENPSNYKTLQIWIKKGHRMYSYFQECCHNAKNMYNTTNFYIRQVYTGLTQEKELQPLQKEVLDHIHKNIGKMNDTQRLAYQKKLEKEKLKPKEEQKEITCNLFSEPNFEKPYVDYNFLDALFKAMIQNDYRALPTQCSQSIMKGLFQNWKSFFASLKDYKKNPNKYAGPPRIPKYIRSSEKEILYTNQDCIIKNDRFLKFPKTKLQLNIGKLGFTEGKLKQVRVIPKYNEYVVELVIDVPSEQQMIEENARYMSIDLGIDNLATIVTNTGMKPVLVKGKHVKSINQYYNKMKSHFTSVLRNGKQTNEGPFTSKRIEKLHQKRYLKIKDVFHKVSHHIVKLAQEEEVCKIVIGQNKSWKQETNMGKRNNQTFCHIPHSLLIQMITYKANAVGIQVVVTEESYTSKASFLDNDFIPTYGENDQNTTFSGKRIERGIYRSANKTIIHADVNAAANILRKVIPNAWTNGIEGLGVKQLANVLTPLTLIVR

SEQ ID NO: 4729 - protein, 413 aa, unidentified
MKLSFKFRPNINPTQLEIIEELSYHTTKLYNIISYDLRKNGFKNYYEIEKLYKNNWHCDFLHSHTRQQMFKILEQNWKSYFASIKDFGVNPSKYKGLPRPPKFKNTERNKNEIIFTNLAIRFQDGILKLSLSKSIQKLFKVDSLNFEVSNKLQSLINWNRLQQARFNYDKVQRCWYLIVIYNKDEVENSNDNVMSIDIGLDNLATITFKNGINQYVYCGKKLKSVNSYANKRIAYLQAIEMKKYGSDKFKNTKEINRLRKYRNNYINDYLHKVSKNIIDKAIKNNVGKIVIGKLKDIKQDMNYNKSFVQIPIQRLVELITYKAKLKGIEIKLQEESYTSGCSAIDLEPVAKKYYNKSRRITRGLFKSGYGILNADINGSLNILRKAEKCIPDLVNAMRDKGNWTHPQRIRVAC

SEQ ID NO: 4730 - protein, 489 aa, unidentified
MTKENPSNYKTLQIWIKKGHRMYSYFQECCHNAKNMYNTTNFYIRQVYTGLTQEKELQPLQKEVLDNIHKNIGKMNDTQLLAYQKKLEKENLKPKEEQKEIKCNLFSEPNFEKPYVDYNFLDALFKAMIQNDYRALPTQCSQSIMKGLFQNWKSFFASLKDYKKNPNKYAGMPRIPKYIRSSEKEILYTNQDCIIKNGRFLKFPKTKLQLNIGKLGFTEGKLKQVRVIPKYNEYVVELVIDVPSEQQMIEENARYMSIDLGIDNLATIVTNTGMKPVLVKGKHVKSINQYYNKMRSHFTSILRNGKQTNKGPFTFKRIEKLHQKRYLKIKDVFHKVSHHIVKLAQEEEVCKIVIGQNKSWKQETNMGKRNNQSFCYIPHNLLIQMITYKANAVGIQVVVTEESYTSKASFLDNDFIPTYGENDQNTTFSGKRIERGIYRSANKTLINADVNAAANILRKVIPNAWTNGIEGLGVKQLANVLTPLTLIIR

SEQ ID NO: 4731 - protein, 479 aa, unidentified
MAVYRTLQIWVKKGHRMHLYFQNMCQNAKNMHNTTNFYIRQVFTGLKQEKELQPLQKEVLESLQTHLPAINANQLKAYQRRSVKEQEKAKSEQKEIKCHLFEMPSKDHPYIPYSFLDALFKSMKQTDYQSLPIQSSQGIMRTVFQNWKAFYGSLREYKKNPIKFKARPNIPSYCRLKEKEVVFSNQDCVVKAKKFLKFPKTKLCLNIGKLGYSEGKLKQVRVVPKYGHYVVELVFQVPIEVEKKESKNRFLAVDLGIDNLATIVTNTGKRPMLVKGKNVKSINQRYNQLKAYHASILRQGKQSNEGSFTSKRLEKISRKRFLQIKDLFHKASFQILKIALEEDIDTIIIGKNKDWKQHVTIGKRNNQSFTNIPHSLLIQMITYKAEKHGITVVLTEESYTSKASFLDNDDIPVYGQKHKIAVFSGKRIKRGMYLSKNQERIHADVNGAANIMRKIFKDAFHHDFASIDALRRPVSLIVK

SEQ ID NO: 4732 - protein, 426 aa, unidentified
MINLARKKNSNNGMPMQTLTAKAKVVNLCDRDALLLGLLGFAATKLWNGANHHRRSVWNETGKIPGFAEQCRELKANRWYKLLPSQSSQEILGEQDDSYRSWFSHRKNGNKNAHPPGFRKKDSLSTVTFKQNAFEMLPGNRVKLKLPKTYARQEILLEYQLPPDVTLGKVQQVKLVYEPKTGDWYLHITHKVMIKYSEIGNIMSLDLGIVNIIAGLITDGFSFIVPGGELLALDRYFQKEKAKCTKSTSRKCVRLNAKWGRQRSHYLHVLTKWLVNLAIAHDVSTILVGELKGIRAGKDWGDVGNQKLHAWPFSKIISLLTYKAALAGIRVIKVSEKSTSTTCPVCSRRTKKARVYRGLFVHCGLALNADLVGAYNILQRYLREAGLTLPDRPGVVGALARPAVNLFVWRKTTPEGREQGTFKQAA

SEQ ID NO: 4733 - protein, 489 aa, unidentified
MEIATEKEVNKNYITQQIWIKKGHRMYGYFQNMTQNAKNMFNTTNFYIRQVYTGLTSNKALQPLQIEVLDTITNNIDKMNDSQLLAYHKRVEKQKSKPKDKQKEIKCHLFEVPFKESPYVDYNFLDSLFKKIAQNDYRSLPTQSSQGIMQTVFQNWKSFYASLKDYKQNPTKYKAKPKIPKYSRAKEKEVLFTNQDCVIKNNKFLKFPKTKQQLNIGKLGLSNGKLKQVRVIPKYNQYVVELVMDVPSEPIEKEDNGRYMSIDLGNDNLATIVTNTGRKPTLIKGKSVKSINQYYNKMKAYFLGIIRHGKQTNEGPFTTKRLEHLHQNRFLKIKDVFHKASNIVVKLALEENIHTIIIGQNKGWKQEVNIGKRNNQTFVHIPHRLFIEMVKYKAEQQGIQVYVSEESYTSKASFLDGDEIPTYGENNEKKIFSGRRIKRGLYRSKHGLLINADVNGAANIMKKAVCRLKKDSFFNIETINLWNPQSIII

SEQ ID NO: 4734 - protein, 490 aa, unidentified
MTALGMNSLSDQDLTRKSVYNPFKLQNPRRKAHGFSCGMKAKKREHVLWFFRVFCIIKIEDRKEQGAMARKKNSGNHTPMQTITSRAKIVYLADQDALLLGLLGFFATKLWNTANHHRRVVWGETGKIPNFVEQCRDLKTNRWYKLIPSQSAQEILGELDDSYRSWFSHRKNGDLSARPPRFRKKEPLSTITFKQKAFEILPGNHVKVRLPKTYARREMVLEYHLPPDTTLGKVQQVKLSCDPTSGDWYVHIVHKVPIKYRETGQVMSLDLGIVNTVAGLITDGFSFLVPGGELLALDRYFQKEKAKCTKSTSRKCIRINAKWGRQRSHYLHALTKWLVDLAVAHNVSTILVGELKGIRADKDWGDAGNQKLHTWPFSKIISLLTYKAALAGIRVIKVSEKSTSTTCPVCSRRTKKARVYRGLFVHCGLALNADLVGAYNILQRYLRETGQAWPDPVGVVGALARPAVNLFVWRKTTPLGRGQGTFRRAA

SEQ ID NO: 4735 - protein, 482 aa, unidentified
MVLGVVVPRRRDPAAPRVVHRTARVALRVTPGQQRRCFGLLRSAGDVWACVLEVNAWRRRRRDAPLSGYQELCRELAASGPGTFAELDSAGARSVLRRFSEAWFAAAKRRKDGDVSAGFPRRRRGLVPVRWYHGTFALQGRRVRIPMGKGASPLWVRLAREVPYPLEQVRSITLLCEGGRLFLDVSAEIPIVSYPAGAGPDPGRIAGVDLGIIHPYAVAGPDGAGLLVSGRAIRAEHRMHLADTKARRRAVARRAPKPGQRGSRRWRKYRRRARMVQGRHRRRVRQAQHEAARSVVSWAVEQRVGELRVGDPRGVLGIEAGRRHNLRLRQWQIGRLLQVLTDKATLAGITLRLVNERGTSLTCPACQRRVPKPRGRILSCPHCRFSGHRDLVAAAIIATRIPGGGPTTPTAVVLPEVLTHRRAGRHLPGAGRSRRDPRRPRAARGSVGPRRPAPPPAGESLAHKARIHNHHRTPGERSWTPH

SEQ ID NO: 4736 - protein, 413 aa, unidentified
MKLSFKFRPNINPTQLEIIEELSYHTTKLYNIISYDLRKNGFKNYYEIEKLYKNNWHCDFLHSHTRQQMFKILEQNWKSYFASIKDFGVNPSKYKGLPRPPKFKNTERNKNEIIFTNLAIRFQDGILKLSLSKSIQKLFKVDSLNFEVSNKLQSLINWNRLQQARFNYDKVQKCWYLIVIYNKDEVENSNDNVMSIDIGLDNLATITFKNGINQYVYCGKKLKSVNSYANKRIAYLQAIEMKKYGSDKFKNTKEINRLRKYRNNYINDYLHKVSKNIIDKAIKNNVGKIVIGKLKDIKQDMNYNKSFVQIPIQRLVELITYKAKLKGIEIKLQEESYTSGCSAIDLEPVTKKYYNKSRRITRGLFKSGYGILNADINGSLNILRKSEKCIPDLVNAMRDKGNWTHPQRIRIAC

SEQ ID NO: 4737 - protein, 286 aa, unidentified
MKRLQAFKFQLRPGGQQERQMRLFAGACRFVFNRALALQNENYEAGNKYIPYTKMASWLVEWKKDTETEWLKDSPSQPLQQSLKDLERAYKNFFQKRAAFPRFKKRGQNDAFRYPQGVKLDQENSRIFLPKLGWVRYRNSRQVTGIVKNVTVSQSCGKWYISIQTESEVSTPVHPSASMVGLDAGVARLATLSDGTVFEPVNSFQKNQKKLARLQRQLSRKVRFSNNWQKQKRKIQQLHSRIANIRRDYLHKVTTIISKNHAMIVIEDLKVKHMSKSAAGTISQPG

SEQ ID NO: 4738 - protein, 471 aa, unidentified
MTKENPSNYKTLQIWIKKGHRMYSYFQECCHNAKNMYNTTNFYIRQVYTGLTQEKELQPLQKEVLEHIHKNIGKMNDTQRLAYQKKLEKEKVKPKEEQKEITCNLFSEPNFEKPYVDYNFLDALFKAMIQNDYRALPTQCSQSIMKGLFQNWKSFFASLKDYKKNPNKYAGPPRIPKYIRSSEKEILYTNQDCIIKNDRFLKFPKTKLQLNIGKIGFTEGKLKQVRVIPKYNEYVVELVIDVPSEQQMIEENARYMSIDLGIDNLATIVTNTGMKPVLVKGKHVKSINQYYNKMKSHFTSVLRNGKQTNEGPFTSKRIEKLHQKRYLKIKDVFHKVSHHIVKLAQEEVCKIVIGQNKSWKQETNMGKRNNQTFCHIPHSLLIQMITYKANAVGIQVVVTEESYTSKASFLDNDFIPTYGENDQNTTFSGKRIERGIYRSANKTLIHADVNAAANILRKVIPNAWTNGIEGL

SEQ ID NO: 4739 - protein, 400 aa, unidentified
MQRLQAFKYELMPNGEQQRDMRRFAGSCRFVFNKALALQKANHEAGEKFIGYVAMARLLTGWRNGIETPWLKDSPVHPLQHALKDMERAYKNFFAKRAAFPRFKKRGQRDSFRYPDPKQIKLDQGNSRIFLPKLGWLRYRNSRDVLGAVRNATVSLSAGKWFVSIQTEREVEQPIPQATSAIGIDVGVARFATFSDGSYLAPLNSFKRHEVRLRRYQRAMSRKTKFSNNWKKAKARVQRIHTRIGNARRDYLHKATHTISQNHAMVCIEDLQVRNMSRSAAGSTEQPGKNVRTKSGLNKSILDQGWFEFRRQLDYKLAWNGGWLIAVPPQNTSRKCSACGCISADNRLTQAKFACVKCGFEEHADVVGAINVLARGHRVAACGEAVLSGSSVKQEPPTYK

SEQ ID NO: 4740 - protein, 537 aa, unidentified
MLRTLTIDLKKDCPAYVYLKRNTTGTRALRNTALFYLRNTMTGLRKSPEERTKLETEVLHDVFTGIHMANEAKGKRYRERMLRLRASGMHGMPVYGYIMGAVRDAKPLPCPDETHWHLSYAQLDAILKFTKNPSYYSCTSQVNQQAVKKTVQAWKSWLSALSDWRGHPGKYRAKPKMPGYIRAKEATAHFTNQVAKIAVAGDGRLRLTFSTPRGWEKAPVLYLGPASLLKGKYVKLEVKPYHGKYRLLLTYEDRTEMPGRPDHPGRILGLDPGLDNFLAGVTNTGALPFLISGKWLKSRNQWFNKERARLLSARTKGKDSRHSEKASRRLSALSRKREDTFRDFFYKAAHWVCRYSVRYRIEAIVIGHNEGQKQELPFRKKDNQNFVSIPVSRFLLCLQSVAARYGLPVIIREESYTSKASLRDGDPIPTYGADDPKEGDTFSGKRVKRGLYRAGDGTEWNADLNGAGNILRKEYPYAFDGKEPAASPIQVITREQLCHAKKKAPAATYRREKSLISRLRHEERKERRRACQEAFAA

SEQ ID NO: 4741 - protein, 422 aa, unidentified
MLETTRTYRAKIVNHSQVSDDLDDCGHSASKLWNVARYHIQQEWDGTGEIPSDADLKRELKDHERYSDLHSQSSQRVLEELAESFNGWFKKRKNGDRDANPPGYRKRGDNHPRSTVTWKQNGIKHDSKHNQIRLSKGFNLKQHRSDFLLVEYETRPDVTVENIQQVRAVWNGDRWELHLVCKVEIPVGDAPGDNTAGIDLGISNYLAIAYDDGDAELYPGNVLKQDKHYFTRDEYDTEGDNGPSKRALRARQRLSCRKDHFLHALAKHIVEQCIDHEVGRIAIGDLSQIREDENGDSRNWGKRGNKKLHGWEFDRFTTLLEYKAEEYGILVDCKSERNTSKTCSCCGRKRDANRVERGLYICESCGATMNADVNGAVNIRRKITQNPPTGDMSNGRLARPVAYLFNQTSGRFAPGEQAGCKP

SEQ ID NO: 4742 - protein, 442 aa, unidentified
MVKNLALVFGDKDQVNMHQENTVPSASDISFFHRPKYNLPCETTTAFTFRLRPGGQQEREMRRFAGACRFVFNRALALQNENHEAGNKYIPYGKMASWLVEWKNATETQWLKDSPSQPLQQSLKDLERAYKNFFQKRAAFPRFKKRGQNDAFRYPQGVKLDQENSRIFLPKLGWMRYRNSRQVTGVVKNVTVSQSCGKWYISIQTESEVSTPVHPSASMVGLDAGVAKLATLSDGTVFEPVNSFQKNQKTLARLQRQLSRKVKFSNNWQKQKRKIQRLHSCIANIRRDYLHKVTTTVSKNHAMIVIEDLKVSNMSKSAAGTVSQPGRNVRAKSGLNRSILDQGWYEMRRQLEYKQLWSGGQVLAVPPAYTSQCCACCGHTAKENRLSQSQFRCQVCGYTANADVNGARNILAAGHAVLACGEMVQSGRPLKQEPTEMIQATS

SEQ ID NO: 4743 - protein, 436 aa, unidentified
MKRTVTVKLHPSKTQEKALFELSDISAKAWNRANYLRRQEYFQGKPIDFLKTQKTVYEEFKREIGSATVQTIARKNAEAWRSFFSLLRKKRNGELPNWLKPKPPNYLKENRRRKPLIVLRNDQYKIDGNKLILKGLGRFKRLEIQFKGRIHLRGKQGRLEITYDEVKRKWYAHLSFTVEERLEDEEWIKLPRIPKGSLSAGIDLGVNNLMAIYVENGQSFLVNGRPLKSIDFYWRKKITDYQSKLNRSGAKTSRKLKRMHEKAKLQARHYINTAVRQTVRKLYELGVSRIVVGYPKGITRNSNKGARQNFLLSHVWRFNYVIKRLTEVAEEYGIRVVVVGEAFTSKTCPVCGKPHEGARFVRGLFKCPATGLIFNADLVGAFNILKKAVKTITPSLGGLYAQGRGNWPKTGPEGLKTHFLAGLNETPQTSPSMARG

SEQ ID NO: 4744 - protein, 489 aa, unidentified
MTKENPSNYKTLQIWIKKGHRMYSYFQECCHNAKNMYNTTNFYIRQVYTGLTQEKELQPLQKEVLDNIHKNIGKMNDTQRLAYQKKLEKEKLNPKEEQKEIKCNLFSEPNFKKPYVDYNFLDALFKAMIQNDYRALPTQCSQSIMKGLFQNWKSFFASLKDYKKNPNKYAGTPRIPKYIRSSEKEILYTNQDCIIKNGRFLKFPKTKLQLNIGKLGFTEGKLKQVRVIPKYNEYVVELVIDVPSEQQMIEENARYMSIDLGIDNLATIVTNTGMKPVLVKSKHVKSINQYYNKMKSHFTSVLRNGKQTNERPFTSKRIEKLHQKRYLKIKDVFHKVSHHIVKLAQEEEVCKIVIGQNKNWKQETNMGKRNNQSFCHIPHNLLIQMITYKANAVGIQVVVTEESYTSKASFLDNDFIPTYGENDQNTTFSGKRIERGIYRSANKTLINADVNAAANILRKVIPNAWTNGIEELGVKQLANVLTPLTLIVR

SEQ ID NO: 4745 - protein, 489 aa, unidentified
MTKENSSNYKTLQIWIKKGHRMYSYFQECCHNAKNMYNTTNFYIRQVYTGLTQEKELQPLQKEVLDHIHKNIGKMNDTQLLAYQKRLEKEKLKPKEEQKEITCNLFSEPNFEKPYVDYNFLDALFKAMIQNDYRALPTQCSQSIMKGLFQNWKSFFASLKDYKKNPNKYAGMPRIPKYIRSSEKEMLYTNQDCIIKNSRFLKFPKTKLQLNIGKLGFTEGKLKQVRVIPKYNEYVVELVIDVPSEQQMIEENARYMSIDLGIDNLATIVTNTGMKPVLVKGKHVKSINQYYNKMKSHFTSALRNGKQTNEGPFTSKRIEKLHQKRYLKIKDVFHKVSHHIVKLAQEEEVCKIVIGQNKSWKQETNMGKRNNQSFCHIPHSLLIQMITYKANAVGIQVVVTEESYTSKASFLDNDFIPTYGENDQKTTFSGKRIKRGIYRSANKTLIHADVNAAANILRKVIPNAWTNGIEGLGVKQLANVLTPLTLIVR

SEQ ID NO: 4746 - protein, 450 aa, unidentified
MTLGQRRRCFGLLRSAGDVWACVLEVNAWRRRRRDVPLSGYQELCRELAASGPGTFAELDSTGARSVLRRFSDAWFAAAKRRSAGDMLARFPRRRRGLVPVRWYHGTFTLDGRRLRIPTAKGSAPLWVRLAREVPYPVEQVRSVTLLCEGGRLFLDVTAEVPVAVYPPGEQPDPARVAGVDLGIIHPYAVAGPDGKGLLVSGRAIRAEHRMHLADTKARRRAVARRAPKPGEKGSRPWRQYRRRARLVEGRHRRRVRQAQHEAARSVVSWAVEQRVGVLHVGDPRGVLDLPAGRRHNLRLRQWQIGRLLQVLTDKAVLAGIVVRLVDERGTSSTCPTCRRRVPKPRGRTLSCPHCRFSGHRDLVAAASIATRTPGGGPTTPTAVALPEVVTHRRAGRHLPGTGRSRRDPRRPPRAARGSVGPRRPAPPPGGESLAPTARIHNTHRKPGER

SEQ ID NO: 4747 - protein, 489 aa, unidentified
MTKENPSNYKTLQIWIKKGHRMYSYFQECCHNAKNMYNTTNFYIRQVYTGLTQEKELQPLQKEVLDNIHKNIGKMNDTQLLAYQKKLEKENLKPKEEQKEIKCNLFSEPNFEKPYVDYNFLDALFKAMIQNDYRALPTQCSQSIMKCLFQNWKSFFASLKDYKKNPNKYAGMPRIPKYIRSSEKEILYTNQDCIIKNGRFLKFPKTKLQLNIGKLGFTEGKLKQVRVIPKYNEYVVELVIDVPSEQQMIEENARYMSIDLGIDNLATIVTNTGMKPVLVKGKHVKSINQYYNKMRSHFTSILRNGKQTNKGPFTSKRIEKLHQKRYLKIKDVFHKVSHHIVKLAQEEEVCKIVIGQNKSWKQETNIGKRNNQSFCYIPHNLLIQMITYKANAVGIQVVVTEESYTSKASFLDNDFIPTYGENDQNTTFSGKRIERGIYRSANKTLINADVNAAANILRKVIPNAWTNGIEGLGVKQLANVLTPLTLIIR

SEQ ID NO: 4748 - protein, 422 aa, unidentified
MLETTRTYRAKIVNHQQVSGDLDDCGHSASKLWNVARYYIRQEWDDTGEIPSEADLKRELKDHERYSDLHSQSSQRFLEELAESFTGWFRKRKNGDSNANPPGYRKRGDNHPRSTVTWKQNGIKHDSKHNKLRLSKGFNLKNHRSDFILVEYETRPDVTVENIQQVRAVWNGDRWELHLVCKVEIPVEDAPGDNTAGIDLGIKNYLAIAYDDGETELYPGNVLKQDKHYFTRDEYDTEGENGPSRRALRARQKLSRRKDHFLHALAKHVVDQCIDHEIGRIAIGELSEIREDENGDSRNWGRRGNKKLHGWEFDRFTRLLEYKAEEHGILVDRTSERDTSKTCSCCGRKREANRVERGLYVCASCGATMNADVNGAVNIRRKITQSPPTGDMSNGRLARPVAYLFNQTSGRFAPSEQVGCEP

SEQ ID NO: 4749 - protein, 400 aa, unidentified
MQRFQAFKFELMPNGEQQRKMRRFAGACRFVFNKALALQKENYDAGGKFIGYVAMSKHLTAWRNGTETPWLKDSPVHPLQHALKDLERAYKNFFAMRAAFPRFKKKGHSDSFRYPDSKQIKLDQVNSRIFLPKLGWLRYRNSRDVLGEVRNVTVSQYVGKWFVSIQTAREVEQPVPRATSAIGIDMGIARFATLSDGSFLAPLNSFKRHEIKLRQAQRVMSRKVKFSRNWKKAKARIQRIHARIGNARRDYLHKATTTISQNHAMVCIEDLRVRNMSRSAAGNSDAPGRSVRVKSRLNKAILDQGWFEFRRLLDYKLAWNGGWLIAVPPANTSRTCPVCTYMSAENRQTQAAFRCVGCGHEDHADVVGAINVLARGHRVAACGEPVQSGRSVKQEPAEAI

SEQ ID NO: 4750 - protein, 500 aa, unidentified
MRWPETLAGWCGSGKLSYGWCWLGFVPRRRDCAAPRVVYRTARVGLRVTGGQRRRCFGLLRSAGDVWACVLEVNAWRRRRRDAPLAGFQELCRELAASGPGTFGELDSTGARSVLRRFSDAWFAVAKRRKAGDVSAGFPRRRRGLVPVRWYHGTFTVVGRRVRIPAARGSAPLWVRLVRDVPYPVEQVRSVTLLCEGGRLFLDVTAEVPVTVYPPGEGPDPARTAGVDLGIIHPYAVAGPDGAGLLVSGRAVRAEYRMHLADTKARRRAVARRAPKPGQRGSRRWRRYRRRARMVEGRHRRRVRQAQHEAARTVISWAQQQRVGVLHVGDPRSVLDIPAGRRHNLRLRQWQIGRLIQVLTDKATLAGITVHMVDERGTSSTCPACHRRIPKPPGRTLTCPHCTFTGHRDLVAAAMIATRKPGGGPTTPTTAVAVLPGVITHRRAGRHLPGAGQSRRDPRRPTQAARGSDGPRRPAPPPGEESLAPNGEDPQHPTGRPGER

SEQ ID NO: 4751 - protein, 506 aa, unidentified
MSRDGLLVRWPETLAGWCGSGKLSYGWCGVWVVPRRRDSAAPRVVYRTARVGLRVTGGQRRRCFGLLRSAGDVWACVLEVNAWRRRRRDAPLAGYQQLCRELAASGPGTFGELDSTGARSVLRRFSDAWFAAAKRRKSGDGAARFPRRRRGLVPVRWYHGTFTVVGRRVRIPAARGSAPLWVRLVRELPYPVEQVRSVTLLCEGGRLFLDVTAEVPVATYPPGEGPDPGRVAGVDLGIIHPYAVAGPDGAGLLVSGRAVRAEYRMHLADTKARRRAVARRAPKPGQRGSRRWRRYRRRARVVEGRHRRRVRQAQHEAARTVISWAQQQRVGVLHVGDPRSVLDIPAGRRHNLRLRQWQIGRLIQVLTDKATLAGITVHLVDERGTSSTCPACHRRIPKPPGRTLTCPHCRFSGHRDLVAAAMIATRRPGGGPTTPTTAVAVLPGVITHRRAGRHLPGAGQSRRDPRRPPGTARGSVGPRWPAPPPGGESLAPHGEDPQHHRKPGER

SEQ ID NO: 4752 - protein, 483 aa, unidentified
MTDFTYHTFQIWIKKGHRLYPYFEQMGVDAKGLYNVTNFYIRQIYTSCRQDKPLQPLQQEVMNTLHQYIEAMNERQLAAYQAKIDKAQLKPLLERREIRCNLFELPSKVRPLVGYNFLDCLFKVMKQKDYLALSIQSSQAVMRLVCQNWKAFFASIKDYGQHPQKYTGKPRIPGYCRAREKEMLFSNQDCVIQEGKYLKLPKTRVRLNIGKLGCTDGKLKQVRVVPKYGQYVVELVFERSIAVEARDKERFMAIDLGVDNLATLVTTTGSQPLLVKGKSIKAINQYYNKLKAHYTGILRQGKAPKEGPHTSKRLAQLHRNRQRRIKDLFHKASYQIVKQAIEQNIGTIVMGKNDGWKQAVSIGRRNNQSFCHIPHHMLIAMIRYKAAEQGIAVQLTEEAYTSKASFLDHDPVPAYEEGRTRSFSGRRIGRGLYRSAKGLINADVNGAANILRKVVPNARANGIAGLDGNQSVNVSTPQVLSIR

SEQ ID NO: 4753 - protein, 424 aa, unidentified
MGRTIRTFEATITNQQQVRDGLDQLGWAASKLWNVGRYYAQEQWDETGEIPDDGELKAELKGHKRYTDLHSQSSQRVLEELAEAFNGWFGKRRNGDNRARPPGYRKNGDSHPRSTVSFKSAGFKHDGQFTRVRLSKGRNLKEHRSDFILCEYQTRPDVDLTNWDIQQVRAVYKRDEWRLQFICRTTIDPEPPGDEVAGVDLGICNFAAVSFGGESVLYPGGALKEDEYYFTKKKAKCDDSSSREATRLDRKRTGRRTHFLHALSKAIVEECVERGVGTLVVGDLGGIREGNKNGKPRNWGDHGNLDLHGWAFDRFTTLLHYKAEAEGIDVELVSERDTSKACSACGHTDDNQRVERGLYVCETCDTVANADVNGAENIRQKVLPSLATDGGDRDNGWLAQPAVHLFDRSEGVFAPREQVVNRES

SEQ ID NO: 4754 - protein, 424 aa, unidentified
MGRTIRTFEATITNQQQVRDGLDQLGWAASKLWNVGRYYAQEQWDETGEIPDDGELKAELKGHKRYTDLHSQSSQRVLEELAEAFNGWFGKRRNGDNRARPPGYRKNGDSHPRSTVSFKSAGFKHDGQFTRVRLSKGRNLKEHRSDFILCEYQTRPDVDLTKWDIQQVRAVYKRDEWRLQFICRTTIDPEPPGDEVAGVDLGICNFAAVSFGGESVLYPGGALKEDEYYFTKKKAKCDDSSSREATRLDRKRTGRRTHFLHALSKAIVEECVERGVGTLVVGDLGGIREGNKNGKPRNWGDHGNLDLHGWAFDRFTTLLHYKAEAEGIDVELVSERDTSKACSACGHTDDNQRVERGLYVCEKCDTVANADVNGAENIRQKVLPSLATDGGDRDNGWLAQPAVHLFDRSEGVFAPREQVVNRES

SEQ ID NO: 4755 - protein, 424 aa, unidentified
MGRTIRTFEATITNQQQVRDGLDQLGWAASKLWNVGRYYAQEQWDETGEIPDDGELKTELKGHERYTDLHSQSSQRVLEELAEAFNGWFGKRRNGDDRARPPGYRKHGDSHPRSTVSFKSAGFKHDGQFTRVRLSKGRNLKEHRSDFILCEYQTRPDVDLTKWDIQQVRAVYKRDEWRLQFICRTTIDPEPPGDEVAGVDLGICNFAAVSFGGESVLYPGGALKEDEYYFTKKKAKCDDSSSREATRLDRKRTGRRTHFLHALSKAIVEECVERGVGTLVVGDLGGIREGNKNGKPRNWGHHGNLDLHGWAFDRFTTLLHYKAEAEGIDVELVSERDTSKACSACGHTDDNQRVERGLYVCEKCDTVANADVNGAENIRQKVLPSLATDGGDRDNGWLAQPAVHLFDRSEGVFAPREQVVNRES

SEQ ID NO: 4756 - protein, 424 aa, unidentified
MSRTIRTFEATITNQQQVRDDLDQLGWAASKLWNVGRYYAQEQWDETGEIPDDGELKAELKRHERYTDLHSQSSQRVLEELAEAFNGWFGKRRNGDDRARPPGYRKHGDSHPRSTVSFKAAGFKHDAQFTRVRLSKGRNLKEHRSDFILCEYETRPDVDLTEWDIQQVRAIYKRDEWRLQFVCRTTIDPEPPGNEVAGVDVGICNFAAVSFGGESVLYPGGALKEDEYYFTKKKAKCDDSSSREATRLDRKRTDRRTHFLHVLSKAIVEECVERGVGTLVVGDLGGIREGDENSESRNWGDHGNLDLHGWAFDRFTTLLDYKAEAEGIDVELVSERDTSKSCSACGHTDDNQRVERGLYVCEKCDTVANADVNGAENIRQKVLPSLATDGGDRDNGWLAQPAVHLFDRSEGVFAPREQVTNREP

SEQ ID NO: 4757 - protein, 414 aa, unidentified
MKLAFKFKPKLNEEQLKIIEELSFHTTKLYNIVNYDLRENGFKPYVEIEKIYKNNWHCDYLHSHTRQHCFKVVEQNWESYFASIKDYKENKSKYNGVPKPPKFKNTDKRKNEIIFTNLAIRFKENRLMLSLSKTVQKKFEVESLNFEVSDKLQSLINWDEIQQVRIKWDNSLKQWYLIIIYNKQELEKAKETNVMAIDLGLDNLATLTFKEGNQSYLFCGKKLKSINAFVNKKISYYQSIEMKKIGSDKFKNTKMINSLRRYRENYINDYLHKVSKNIIDKAIEHNVYKIVIGKIEGLKLNMNYNKSFVQIPIQKLVELIKYKAKLQGIEVKFKEESYTSGCSAFDLEPINKKYYNKTRRVVRGLFKSNFGLVNADVNGSLNILRKEEKCIPEIVKTMRDKGRVSFPLRVRVAC

SEQ ID NO: 4758 - protein, 414 aa, unidentified
MKLAFKFKPKLNEEQLKIIEELSFHTTKLYNIVNYDLRENGFKPYVEIEKIYKNNWHCDYLHSHTRQHCFKVVEQNWESYFASIKDYKENKSKYNGVPKPPKFKNTDKRKNEIIFTNLAIRFKENRLMLSLSKTVQKKFEVESLNFEVSDKLQSLINWDEIQQVRIKWDNSLKQWYLIIIYNKQELEKAKETNVMAIDLGLDNLATLTFKEGNQSYLFCGKKLKSINAFVNKKISYYQSIEMKKIGSDKFKNTKMINSLRRYRENYINDYLHKVSKNIIDKAIEHNVYKIVIGKIEGLKLNMNYNKSFVQIPIQKLVELIKYKAKLQGIEVKFKEESYTSGCSAFDLEPINKKYYNKTRRVVRGLFKSNFGLVNADVNGSLNILRKEEKCIPEIVKTMRDKGRVSSPLRVRVAC

SEQ ID NO: 4759 - protein, 414 aa, unidentified
MKLAFKFKPKLNEEQLKIIEELSFHTTKLYNIVNYDLRENGFKPYVEIEKIYKNNWHCDYLHSHTRQHCFKVVEQNWESYFASIKDYKENKSKYNGVPKPPKFKNTDKRKNEIIFTNLAIRFKENRLMLSLSKTVQKKFEVESLNFEVSDKLQSLINWDEIQQVRIKWDNSLKQWYLIIIYNKQELEKAKETNVMAIDLGLDNLATLTFKEGNQSYLFCGKKLKSINAFVNKKISYYQSIEMKKIGSDKFKNTKMINSLRRYRENYINDYLHKVSKNIIDKAIEHNVYKIVIGKIEGLKLNMNYNKSFVQIPIQKLAELIKYKAKLQGIEVKFKEESYTSGCSAFDLEPINKKYYNKTRRVVRGLFKSNFGLVNADVNGSLNILRKEEKCIPEIVKTMRDKGRVSSPLRVRVAC

SEQ ID NO: 4760 - protein, 479 aa, unidentified
MTTYKTLQIWVKKGHRMHDYFQTMCQSAKNMHNTTNFYIRQVFTALKQKKELQPYQKEVLETIQTHLPKINDNQMIAYQRRIEKEKVKPELQQKEVKCNLFGMPSTENPYVSYHFLDALFKSMAQHDYRSLPAQSSQGIMKNVFQNWRSFYSSLREYKSNPTKFKARPKIPGYCRLKVKEISFSNQDCVIKENKFLKFPKTKEKLNIGKLGCTEGKLKQIRVIPKYGHYVVELIFQVHSESTMKESKNRFMSVDLGIDNLAAIVTNTGRRPVLVKGKHIKSINQQYNQLKARYTGILRQGKRANEIPFTSKRLEKINNKRWNKIKDLFHKVSHQMIKIALEEDIDTIIIGRNKDWKQHANMGKRNNQSFSTIPHSLLIKMITYKAQEHGIHVMLTEEAYTSQASFLDQDEIPVYDNNTKRNLFSGKRIKRGLYRSKDGQIIHADVNGAANIMRKVFKDAFHHTFFNMETLKRPIVLKVK

SEQ ID NO: 4761 - protein, 488 aa, unidentified
MTKENPSNYKTLQIWIKKGHRMYSYFQECCHNAKNMYNTTNFYIRQVYTGLTQEKELQPLQKEVLDHIHKNIGKMNDTQRLAYQKKLEKEKVKPKEEQKEITCNLFSEPNFEKPYVDYNFLDALFKAMIQNDYRALPTQCSQSIMKGLFQNWKSFFASLKDYKKNPNKYAGPPRIPKYIRSSEKEILYTNQDCIIKNDRFLKFPKTKLQLNIGKLGFTEGKLKQVRVIPKYNEYVVELVIDVPSEQQMIEENARYMSIDLGIDNLATIVTNTGMKPVLVKGKHVKSINQYYNKMKSHFTSVLRNGKQTNEGPFTSKRIEKLHQKRYLKIKDVFHKVSHHIVKLAQEEVCKIVIGQNKSWKQETNMGKRNNQTFCHIPHSLLIQMITYKANAVGIQVVVTEESYTSKASFLDNDFIPTYGENDQNTTFSGKRIERGIYRSANKTLIHADVNAAANILRKVIPNAWTNGIEGLGVKQLANVLTPLTLIVR

SEQ ID NO: 4762 - protein, 400 aa, unidentified
MQRLQAFKFELTPNGEQQRKMRRFAGACRFVFNKALALQKENHEAGGKFIGYVAMAKHLTAWRNGTETPWLKDAPVHPLQHALKDLERAYKNFFAKRAAFPCFKKKGHSDSFRYPDSKQIKLDQVNNRVFLPKLGWLRYRNSRDVLGEVRNATVSRNAGKWFVSIQTGREVAQPVPQATSAIGIDLGIARFATLSDGSFLAPLNSFKRHEARLRCAQRAMSRKVKFSNNWKKAKARIQRIHAGIGNARRDYLHKATTTISQNHAMVCIEDLQVRNMSKTVAGSPDAPGKNVRAKSGLNKAILDQGWFEFRRQLDYKLAWNGGWLIAVPPANTSRTCPVCEYASAENRQTQAAFRCVACGHEEHADVVGAINILARGHRVAACGEPVQSGRSVKQEPAEVL

SEQ ID NO: 4763 - protein, 483 aa, unidentified
MTKEKEYATYQIWIKKGHKLYAYFMEMCKNAKNLYNTTNFYIRQVYTALRTEKTLQPLQQEVLHTLQAYIEIINENQLHAYQKRVQKQKEKPAEERKEIKCNLFTLPTKEKSFLSYNFLDCLFKTMKQQDYINLPSQVNQAVMKKLHQNWKSFFASMKAYQKHHSTFTGRPRIPKYIKSSMKEIVFTNQVCKLQDKYIRFPKTSIKLNIGKLFGRIGNLREVRVSPAYGKFKIEIVTEQSGPALKHVDNNRYMSIDLGIHNIATIVTNTGATPVLVKGNVIKSINQYYNKQKAHLLSILRHGKEPKEGPHTSKRLERLHEKRFLKIKDLFHKMSYHIVHFAVQHEISIIVIGKNTSWKQNSDMGKRQNQSFCHIPHNLLIEMINYKAKRHGIMVQVVEESYTSKASFLDADDIPTYGEQDISVFSGKRIKRGLYRTKENKLLNADVNGSYNILKKAVPKAFADGIEGLCHQAAVSTPLVLSIS

SEQ ID NO: 4764 - protein, 489 aa, unidentified
MTKENPSNYKTLQIWIKKGHRMYSYFQECCHNAKNMYNTTNFYIRQVYTGLTQEKELQPLQKEVLDNIHKNIGKMNDTQLLAYQKKLEREKLKPKEEQKEIKCNLFSEPNFENPYVDYNFLDALFKAMIQNDYRALPTQCSQSIMKGVFQNWKSFFASLKDYKKNPNKYAGMPRIPKYIRSSEKEILYTNQDCIIKNGKFLKFPKTKLQLNIGKLGFTEGKLKQVRVIPKYNEYVVELVIDVPSEQQIIEENARYMSIDLGIDNLATIVTNTGMKPVLVKGKHVKSINQYYNKMKSHFTSILRNGKQTNEGPFTSKRIEKLHQKRYLKIKDVFHKVSHHIVKLAQEEEVCKIVIGQNKSWKQETNMGKRNNQSFCYIPHNLLIQMITYKANAGGIQVVVTEESYTSKASFLDNDFLPTYGENDQNTTFSGKRIKRGIYRSANKTLINADVNAAANILRKVIPNAWTNGIEGLGVKQLANVLTPLTLIVR

SEQ ID NO: 4765 - protein, 489 aa, unidentified
MTKENPSNYKTLQIWIKKGHRMYSYFQKCCHNAKNMYNTTNFYIRQVYTGLTQEKELQPLQKEVLDNIHKNIGKMNDTQLLAYQKKLEREKLKPKEEQKEIKCNLFSEPNFENPYVDYNFLDALFKAMIQNDYRALPTQCSQSIMKGVFQNWKSFFASLKDYKKNPNKYAGMPRIPKYIRSSEKEILYTNQDCIIKNGKFLKFPKTKLQLNIGKLGFTEGKLKQVRVIPKYNEYVVELVIDVPSEQQIIEENARYMSIDLGIDNLATIVTNTGMKPVLVKGKHVKSINQYYNKMKSHFTSILRNGKQTNEGPFTSKRIEKLHQKRYLKIKDVFHKVSHHIVKLAQEEEVCKIVIGQNKSWKQETNMGKRNNQSFCYIPHNLLIQMITYKANAGGIQVVVTEESYTSKASFLDNDFLPTYGENDQNTTFSGKRIKRGIYRSANKTLINADVNAAANILRKVIPNAWTNGIEGLGVKQLANVLTPLTLIVR

SEQ ID NO: 4766 - protein, 489 aa, unidentified
MTKENPSNYKTLQIWIKKGHRMYSYFQECCHNAKNMYNTTNFYIRQVYTGLTQEKELQPLQKEVLDNIHKNIGKMNDTQLLVYQKKLEREKLKPKEEQKEITCNLFSEPNFENPYVDYNFLDALFKAMIQNDYRALPTQCSQSIMKGVFQNWKSFFASLKDYKKNPNKYAGMPRIPKYIRSSEKEILYTNQDCIIKNGRFLKFPKTKLQLNIGKLGFTEGKLKQVRVIPKYNEYVVELVIDVPSEQQIIEENARYMSIDLGIDNLATIVTNTGMKPVLVKGKHVKSINQYYNKMKIHFTSILRNGKQTNEGPFTSKRIEKLHQKRYLKIKDVFHKVSHHIVKLAQEEEVCKIVIGQNKSWKQETNMGKRNNQSFCHIPHNLLIQMITYKANAVGIQVVVTEESYTSKASFLDNDFIPTFGENDQNTTFSGKRIERGIYRSANKTLINADVNAAANILRKVIPNAWTNGVEGLGVKQLANVLTPLTLIVR

SEQ ID NO: 4767 - protein, 483 aa, unidentified
MTKEKEYATYQIWIKKGHKLYAYFMEMCKNAKNLYNTTNFYIRQVYTALRTEKTLQPLQQEVLHTLQAYIEIINENQLHAYQKRVQKQKEKPAEERKEIKCNLFTLPTKEKSFLSYNFLDCLFKTMKQQDYINLPSQVNQAVMKKLYQNWKSFFASMKAYQKHHSTFTGRPRIPKYIKSSMKEIVFTNQVCKLQDKYIRFPKTSIKLNIGKLFGRIGNLREVRVSPAYGKFKIEIVTEQSGPALKHVDNNRYMSIDLGIHNIATIVTNTGATPVLVKGNVIKSINQYYNKQKAHLLSILRHGKEPKEGPHTSKRLERLHEKRFLKIKDLFHKMSYHIVHFAVQHEISIIVIGKNTSWKQNSDMGKRQNQSFCHIPHNLLIEMINYKAKRHGIMVQVVEESYTSKASFLDADDIPTYGEQDISVFSGKRIKRGLYRTKENKLLNADVNGSYNILKKAVPKAFADGIEGLCHQAAVSTPLVLSIS

SEQ ID NO: 4768 - protein, 461 aa, unidentified
MAKENPSNYKTLQIWIKKGHRMYSYFQECCHNAKNMYNTTNFYIRQVYTGLTQEKELQPLQKEVLANIHKNIGKMNDTQLLAYQKKLEKEKLKPKEEQKEITCNLFSEPNFEKPYVDYNFLDALFKAMIQNDYRTLPTQCSQSIMKGLFQNWKSFFASLKDYKKNPNKYAGTPRIPKYIRSSEKEILYTNQDCIIKNGRFLKFPKTKLQLNIGKLGFTEGKLKQVRVIPKYNEYVVELVIDVPSEQQMIEENARYMSIDLGIDNLATIVTNTGMKPVLVKGKHVKSINQYYNKMKSHFTSVLRNGKQTNERPFTSKRIEKLHQKRYLKIKDVFHKVSHHIVKLAQEEEVCKIVIGQNKNWKQETNMGKRNNQSFCHIPHSLLIQMITYKANAVGIQVVVTEESYTSKASFLDNDFIPTYGENDQNTTFSGKRIKRGIYRSANKTLIHADVNAAANILRKVI

SEQ ID NO: 4769 - protein, 400 aa, unidentified
MQRLQAFKFELTPNGEQQRKMRRFAGACRFVFNKALALQKENHEAGGKFIGYVAMAKHLTAWRNGTETPWLKDAPVHPLQHALKDLERAYKNFFAKRAAFPRFKKKGHSDSFRYPDSKQIKLDQVNNRVFLPKLGWLRYRNSRDVLGEVRNASVSRNAGKWFVSIQTGREVAQPVPQATSAIGIDLGIARFATLSDGSFLAPLNSFKRHEDRLRKAQQAMSRKSKFSSNWKKAKARVQRIHSRIGNARRDYLHKATTTISQNHAMVCIEDLQVRNMSKTVAGSPDAPGKNVRAKCGLNKAILDQGWFEFRRQLDYKLAWNGGWLIAVPPANTSRTCPACEYASAENRQTQAAFRCVACGHEEHADVVGAINILARGHRVAACGEPVQSGRSVKQEPAEAL

SEQ ID NO: 4770 - protein, 489 aa, unidentified
MAKENPSNYETLQIWIKKGHRMYSYFQECCHNAKNMYNTTNFYIRQVYTGLTQEKELQPLQKEVLDHIHKNIGKMNDTQLLAYQKKLEKEKLKPKEEQKEITCNLFSEPNFEKPYVDYNFLDALFKAMIQNDYRALPTQCSQSIMKGVFQNWKSFFASLKDYKKNPNKYAGMPRIPKYIRSSEKEILYTNQDCIIKNSRFLKFPKTKLQLNIGKLGFTEGKLKQVRVIPKYNEYVVELVIDVPSEQQIIEENARYMSIDLGIDNLATIVTNTGMKPVLVKGKHVKSINQYYNKMKSHFTSILRNGKQTNEGPFTSKRIEKLHQKRYLKIKDVFHKVSHHIVKLAQEEDVCKIVIGQNKSWKKETNMGKRNNQSFCHIPHSLLIQMITYKANAVGIQVIVTEESYTSKASFLDNDFIPTYGENDQNTTFSGKRIKRGIYCSANKTLIHADVNAAANILRKVIPNAWTNGIEGLGVKQLANVLTPLTLIVR

SEQ ID NO: 4771 - protein, 492 aa, unidentified
MKKTEKDKNPNTYRTFQIHISPTHPMFSYCKEMCQFAKNMYNTTNFYIRQIYTSLKSEKPLQPLQQEVMDQLRMHLPLVNENQYKAYEKKLLMESKKPAEEQKEVKLNLMEMPKEEKSFPSYNLLDALFKSMKQADYKSLPAQSSQGVMKAVYQGWSSFFASIEEYAINPSKFSGRPKIPKYNKTMVKEVYFTNQDCKIQNGMYLKFPKTKQRLCIGKVAEFDGKLQQVRVIPSYNQFTVEMVFKQNNIVEIPEKPKYERMMSIDLGVNNLATIVMNTGRRPVIVKGKTVKSINQYYNKKRAYLYGILRQGKEKREGLFTSKKLERLGRKRFLKIKDMFHKMSYNIVQLAVQEGIDTIIVGKNNGWKQELEMRKDAKQNFVQLPHNLFIQQITYKANTKGIHVVTVEESYTSKASFLDFDDIPTYGQTEIEPVFTGKRVKRGLYRSAEGTYLNADVNGAGNILRKVVPNAFEPFKSNGIEGAVSHPRVLSVR

SEQ ID NO: 4772 - protein, 488 aa, unidentified
MTKENPSNYKTLQIWIKKGHRMYSYFQECCHNAKNMYNTTNFYIRQVYTGLTQEKELQPLQKEVLDHIHKNIGKMNDTQRLAYQKKLEKEKLKPKEEQKEITCNLFSEPNFEKPYVDYNFLDALFKAMIQNDYRALPTQCSQSIMKGLFQNWESFFASLKDYKKNPNKYAGPPRIPKYIRSSEKEILYTNQDCIIKNDRFLKFPKTKLQLNIGKLGFTEGKLKQVRVIPKYNEYVVELVIDVPSEQQMIEENARYMSIDLGIDNLATIVTNTGMKPVLVKGKHVKSINQYYNKMKSHFTSVLRNGKQTNEGPFTSKRIEKLHQKRYLKIKDVFHKVSHHIVKLAQEEVCKIVIGQNKSWKQETNMGKRNNQTFCHIPHSLLIQMITYKANAVGIQVVVTEESYTSKASFLDNDFIPTYGENDQNTTFSGKRIERGIYRSANKTLINADVNAAANILRKVIPNAWTNGIEGLGVKQLANVLTPLTLIVR

SEQ ID NO: 4773 - protein, 489 aa, unidentified
MTKENPSNYKTLQIWIKKGHRMYSYFQECCHNAKNMYNTTNFYIRQVYTGLTQEKELQPLQKEVLDNIHKNIGKMNDTQLLAYQKKLEKEKLKPKEEQKEITCNLFSEPNFENPYVDYNFLDALFKAMIQNDYRALPTQCSQSIMKGLFQNWKSFFASLKDYKKNPNKYAGMPRIPKYIRSSEKEILYTNQDCIIKNSRFLKFPKTKLQLNIGKLGFTEGKLKQVRVIPKYNEYVVELVIDVPSEQQIIEENARYMSIDLGIDNLATIVTNTGMKPVLVKGKHVKSINQYYNKMKIHFTSILRNGKQTNEGPFTSKRIEKLHQKRYLKIKDVFHKVSHHIVKLAQEEEVCKIVIGQNKSWKQETNMGKRNNQSFCHIPHNLLIQMITYKANAVGIQVVVTEESYTSKASFLDNDFIPTFGENDQNTTFSGKRIERGIYRSANKTLINADVNAAANILRKVIPNAWTNGIEGLGVKQLANVLTPLTLIIR

SEQ ID NO: 4774 - protein, 489 aa, unidentified
MTKENPSNYKTLQIWIKKGHRMYSYFQECCHNAKNMYNTTNFYIRQVYTGLTQEKELQPLQKEVLDNIHKNIGKMNDTQLLVYQKKLEREKLKPKEEQKEITCNLFSEPNFENPYVDYNFLDALFKAMIQNDYRALPTQCSQSIMKGVFQNWKSFFASLKDYKKNPNKYAGMPRIPKYIRSSEKEILYTNQDCIIKNGRFLKFPKTKLQLNIGKLGFTEGKLKQVRVIPKYNEYVVELVIDVPSEQQIIEENARYMSIDLGIDNLATIVTNTGMKPVLVKGKHVKSINQYYNKMKIHFTSILRNGKQTNEGPFTSKRIEKLHQKRYLKIKDVFHKVSHHIVKLAQEEEVCKIVIGQNKSWKQETNMGKRNNQSFCHIPHNLLIQMITYKANAVGIQVVVTEESYTSKASFLDNDFIPTFGENDQNTTFSGKRIERGIYRSANKTLINADVNAAANILRKVIPNAWTNGIEGLGVKQLANVLTPLTLIVR

SEQ ID NO: 4775 - protein, 489 aa, unidentified
MTKENPSNYKTLQIWIKKGHRMYSYFQECCHNAKNMYNTTNFYIRQVYTGLTQEKELQPLQKEVLDNIHKNIGKMNDTQLLAYQKKLEKEKLKPKEEQKEITCNLFSEPNFENPYVDYNFLDALFKAMIQNDYRALPTQCSQSIMKGLFQNWKSFFASLKDYKKNPNKYAGMPRIPKYIRSSEKEILYTNQDCIIKNSRFLKFPKTKLQLNIGKLGFTEGKLKQVRVIPKYNEYVVELVIDVPSEQQMIEENARYMSIDLGIDNLATIVTNTGMKPVLVKGKHVKSINQYYNKMKIHFTSILRNGKQTNEGPFTSKRIEKLHQKRYLKIKDVFHKVSHHIVKLAQEEEVCKIVIGQNKSWKQETNMGKRNNQSFCHIPHNLLIQMITYKANAVGIQVVVTEESYTSKASFLDNDFIPTFGENDQNTTFSGKRIERGIYRSANKTLINADVNAASNILRKVIPNAWTNGIEGLGVKQLANVLTPLTLIVR

SEQ ID NO: 4776 - protein, 489 aa, unidentified
MTKENPSNYKTLQIWIKKGHRMYSYFQECCHNAKNMYNTTNFYIRQVYTGLTQEKELQPLQKEVLANIHKNIGKMNDTQLLAYQKKLEKEKLKPKEEQKEIKCNLFSEPNFEKPYVDYNFLDALFKAMIQNDYRALPTQCSQSIMKGLFQNWKSFFASLKDYKKNPNKYAGMPRIPKYIRSSEKEILYTNQDCIIKNSRFLKFPKTKLQLNIGKLGFTEGKLKQVRVIPKYNEYVVELVIDVPSEQQIIEENARYMSIDLGIDNLATIVTNTGMKPVLVKGKHVKSINQYYNKMKSHFTSILRNGKQTNEGPFTSKRIEKLHQKRYLKIKDVFHKVSHHIVKLAQEEEVCKIVIGQNKGWKQETNMGKRNSQSFCHIPHNLLIQMITYKANAVGIQVVVTEESYTSKASFLDNDFIPTYGENDQNTTFSGKRIERGIYRSANKTLINADVNAAANILRKVIPNAWTNGIEGLGVKQLANVLTPLTLIVR

SEQ ID NO: 4777 - protein, 489 aa, unidentified
MTKENPSNYKTLQIWIKKGHRMYSYFQECCHNAKNMYNTTNFYIRQVYTGLTQEKELQPLQKEVLDNIHKNIGKMNDTQLLAYQKKLEKEKLKPKEEQKEIKCNLFSEPNFEKPYVDYNFLDALFKAMIQNDYRALPTQCSQSIMKGLFQNWKSFFASLKDYKKNPNKYAGMPRIPKYIRSSEKEILYTNQDCIIKNGRFLKFPKTKLQLNIGKLGFTEGKLKQVRVIPKYNEYVVELVIDVPSEEQIIEENARYMSIDLGIDNLATIVTNTGMKPVLVKGKHVKSINQYYNKMKSHFTSILRNGKQTNEGPFTSKRIEKLHQKRYLKIKDVFHKVSHHIVKLAQEEEVCKIVIGQNKSWKQETNMGKRNNQSFCHIPHNLLIQMITYKANAVGIQVVVTEESYTSKASFLDNDFIPTYGENDQNTTFSGKRIKRGIYRSANKTLINADVNAAANILRKVIPNAWTNGIEGLGVKQLANVLTPLTLIVR

SEQ ID NO: 4778 - protein, 489 aa, unidentified
MTMENQTNYKTLQIWIKKGHRMYSYFQESCQNAKNMYNTTNFYIRQVYTGLTQDKELQLLQKEVLDTISKNIGKMNDTQLLSYQKKLEKEKTKPKEKQKEVKCNLFSAPTTEKPYVDYNFLDTLFKVMIQNDYRALPTQSSQSIMKNVFQNWKSFFASLKNYKKNPNKYTGRPRIPKYIRSSEKEILYTNQDCVIKNDKFLKFPKTKLQLNIGKLGFTEGKLKQVRVIPKYNEYVVELVVDVPSEQQSVEENGRYMSIDLGIDNLATIVTNTGMKPVLVKGKHIKSINQYYNKMKSHFTSVLRKGKQTKEGPFTSKRIEKLHQKRYLKIKDIFHKASHHIVKLAQEEEVCKIVIGQNKSWKQETNMGKKNNQTFCHISHSVLIQMITYKANAVGIQVIVTEESYTSKASFLDHDFIPTYGTNDQNATFSGKRMKRGMYRSAKGIEINADVNAAANILRKVVPDAWTNGIEGLGVKQLASVLTPLTLIIH

SEQ ID NO: 4779 - protein, 483 aa, unidentified
MTKEKEYATYQIWIKKGHKLYAYFMEMCQNAKNLYNTTNFYIRQVYTALRTDQPLQPLQQEVLHTLQAHIEIMNENQLHAYQKRVLKQKEKPVKEQKEMKCNLFTLPTKEKSFLSYHFLDCLFKTMKQQDYMNLPAQTNQAVMKKLYQNWKSFFASIKAYQKHPSTFTSRPRIPKYIKSSMKEIVFTNQVCKLQEKYIRFPKTSMKLNIGKLFGQIGNLKEVRVSPAYRKFKVEIVTEQSEPASEDVENNRYMSIDLGINNIVTIITNTGATPVLVKGNVIKSINQYYNKQKAHLLGILRHGKEPKEGPHTSKRLERLHEKRFLKIKDLFHKMSYYIVKLAIQHEISMIVIGKNTSWKQNSDMGKRQNQSFCHIPHNLLIEMINYKAKRQGIMVQVVEESYTSKASFLDNDDIPTYGEEDIPVFSGKRIKRGLYRTKGNKLLNADVNGSYNILKKAVPKAFADGIEGLCHQAAVSTPLVLSIS

SEQ ID NO: 4780 - protein, 489 aa, unidentified
MTTGNQINYKTLQIWIKKGHRMYSYFRESCQNAKNMYNTTNFYIRQVYTGLTQDKELQPLQKEVLDTISKNIGKMNDTQLLAYQKKLGKEKTKPKEKQKEVKCNLFSEPTTEKPYVDCNFLDALFKAMIQNDYRALPTQSSQSIMKNVFQNWKSFFASLKDYKKNPNKYTGKPRIPKYIRSSEKEILYTNQDCVIKNDKFLKFPKTKLQLNIGKLGFTEGKLKQVRVIPKYNEYVVELVIDVPSEQQSVEENGRYMSIDLGIDNLATIVTNTGIKPVLVKGKHVKSINQYYNKMKSHFTSVLRQGKQTNEGPFTSKRIEKIYQKRYLKIKDIFHKASHHIVKLAQEEEVCKIVIGQNKSWKQETDIGKKNNQTFCHISHSVLIQMITYKANAVGIQVVVTEESYTSKASFLDHDFIPTYGTNDQNATFSGKRMKRGMYRSAKGIKINADVNAAANILRKVVPDAWTNGIEGLGVKQLASVLTPLTLIVH

SEQ ID NO: 4781 - protein, 483 aa, unidentified
MTKEKEYATYQIWIKKGHKLYSYFLEMCQNAKNLYNTTNFYIRQVYTALRTDKPLQPLQQEVLHTLQAHIEIMNENQLHAYQKRVQKQKEKPVKEQKDIKCNLFTLPTKEKSFLSYHFLDCLFKTMKQQDYMNLPAQTNQAVMNKLYQNWKSFFASIKVYQKHPSTFTGKPRIPKYIKSSMKEIVFTNQVCKLQERYIRFPKTSIKLNIGKLFGQIGNLKEVRVSPSYGKFKVEIVTEQSEPAPEAVDNKRYMSIDLGINNVATITTNTGATPVLVKGNVIKSINQYYNKQKAYLLGILRHGKEPKEGPHTSNRLERLHEKRFLKIKDLFHKMSYHIVQLAVQYEISTIVIGKNTPWKQNSEMGKRQNQSFCHIPHNLLIEMITYKAKRKGIAVQVVEESYTSKASFLDSDAIPTYGEEDIPVFSGKRIKRGLYRTKENKLLNADVNGSYNILKKAVPKAFADGIEGLCHQAAVSTPLVLSIF

SEQ ID NO: 4782 - protein, 489 aa, unidentified
MTKENPSNYKTLQIWIKKGHRMYSYFQECCHNAKNMYNTTNFYIRQVYTGLTQEKELQPLQKEVLDNIHKNIGKMNDTQLLAYQKKLEKEKLKPKEEQKEITCNLFSEPNFENPYVDYNFLDALFKAMIQNDYRALPTQCSQSIMKGLFQNWKSFFASLKDYKKNPNKYAGMPRIPKYIRSSEKEILYTNQDCIIKNSRFLKFPKTKLQLNIGKLGFTEGKLKQVRVIPKYNEYVVELVIDVPSEQQIIEENARYMSIDLGIDNLATIVTNTGMKPVLVKGKHVKSINQYYNKMKIHFTSILRNGKQTNEGPFTSKRIEKLHQKRYLKIKDVFHKVSHHIVKLAQEEEVCKIVIGQNKSWKQETNMGKRNNQSFCHIPHNLLIQMITYKANAVGIQVVVTEESYTSKASFLDNDFIPTFGENDQNTTFSGKRIERGIYRSANKTLINADVNAAANILRKVIPNAWTNGIEGLGVKQLANVLTPLTLIVR

SEQ ID NO: 4783 - protein, 435 aa, unidentified
MKRTVTLKLQPSKEQAKTLQQLADTEAKVWNQVNYLRRQQFFKEQIVDFNKTEKTVYEEFKREIGSATVQQICRKNAEAWRSFFSLLRKKRNGELPSWLKPKPPNYLKEDGRRKPLIVLRNDQYRIEGNKLILKGLGKFGRLEIQFKGRIHLKGKQGRLEITYDPVKRKWYAHVSLAVEEKLESGEWIKLPRTPRGNLSAGIDLGVNNLMVAYVENGESFLVNGRPLKSIDFYWRKKIAEYQSKLNKSGAKTSRKLKRMHERAKLQAKHYINTAVRQTVKKLYDLGVSRIIVGYPKGIARNSDKGKKQNFLLSHVWRFNYVIKRLTEVAEEYGIRVVVVDEAFTSKLCPVCGKPHEGARFVRGLFKCPATGLVFNADLVGAFNILRKVVTTITPNLSGLYAQGRGNWPKTRPEGFEEPVVTGSLMRTPRTSLPVG

SEQ ID NO: 4784 - protein, 476 aa, unidentified
MTEYKTMQIWVKNGHRMYDYFQEMCQNAKNMHNTTNFYVRQVFTSLTQEKELQPLQQEVLENIQKHLPKMNDTQLIAYKKRLEKEKTKPVEKRKEIKCNLFDIPSKEKPYVDYNFLDALFKSMVQNDYRSLPTQSSQGIMKTVFQNWKSFYASLREFKVNPSKFKARPRIPGYSRAREKEVSFTNQDCGIKDKKFLKFPKTKGCLNIGKLGFTEGKLKQVRVLPKHGKYVVELVFGIPSEREMKESKQRYMSVDLGVDNLATIVTNTGRRPVLVKGKSIKSVNQRYNKLKAHYTAILRKGKNPKKGQFSSKRLEKINNKRFNQIKDLFHKASHQVEKIALEEDIDTIIIGQNKDWKQNTNMSKKNNQSFVSIPHSLLIQMITYKAERHGIKVIVTEESYTSKASFLDNDDIPVYGESDTKKSFSGKRIKRGLYRSKNGTFINADVNGAANIMRKVFIKAFEETLSSLLQPESLLLK

SEQ ID NO: 4785 - protein, 479 aa, unidentified
MANYKTMQVWVKKSHRMYGYFEEMCSSSKNLFNTTNFYTRQVFTGLTQEKPLQPLQQEVLENIQKHVPKINDNQQAAYQRKLEKEKAKPVEKRKEIKCNLFDEPSKENPFVDYNFMDALFKSMIQQDYRSLPTQSSQGIMKAVFHNWKSFYSSLREYKANPKKFKARPKIPGYSRNKEKEVSFSNQDCVIKESKFLKFPKTKERLNIGKLGFTEGKLKQVRVLPKYGHYVVEMIFQVPSEQGIKEPKKRYMSVDLGNDNIATIITNTGRRPVLVKGKNIKSVNQRYNQLKAHYMGILRHGKNHKEGQFTSKCLEKISHKRFNQIKDLFHKASFQIEKIALEEDVDTIIIGQNKDWKQNSNMGKRNNQSFVSIPHSLLIQMITYKAERHGIKVEVTEESYTSKASFLDNDNLPVYGEDDSKKSFSGKRIKRGLYRSKNGTLLNADVNGAGNIMRKLFPNALEEAFSCMETLMNPMSVVIK

SEQ ID NO: 4786 - protein, 489 aa, unidentified
MTKENSSNYKTLQIWIKKGHRMYSYFQECCHNAKNMYNTTNFYIRQVYTGLTQEKELQPLQKEVLDHIHKNIGKMNDTQLLAYQKRLEKEKLKPKEEQKEITCNLFSEPNFEKPYVDYNFLDALFKAMIQNDYRALPTQCSQSIMKGVFQNWKSFFASLKDYKKNPNKYAGMPRIPKYIRSSEKEILYTNQDCIIKNSRFLKFPKTKLQLNIGKLGFTEGKLKQVRVIPKYNEYVVELVIDVPSEQQIIEENARYMSIDLGIDNLATIVTNTGMKPVLVKGKHVKSINQYYNKMKSHFTSILRNGKQTNEGPFTSKRIEKLHQKRYLKIKDVFHKVSHHIVKLAQEEDVCKIVIGQNKSWKQETNMGKRNNQSFCHIPHSLLIQMITYKANAVGIQVIVTEESYTSKASFLDNDFIPTYGENDQNTTFSGKRIKRGIYCSANKTLIHADVNAAANILRKVIPNAWTNGIEGLGVKQLANVLTPLTLIVR

SEQ ID NO: 4787 - protein, 423 aa, unidentified
MAKRVVTRTYTAGICNQRQVRDDLDSLGFAASKLWNVARWTVGRVWDACGQIPDDGVLKSYLKSHERYADLNAQSSQKVLEELSEAFNGWYGHRRNGNQNANPPGYRKHGDDHPRSTVTFKEDGFKHDAKYNRVRLSKGRNLKEHWSDFILCKYDAGPNVTVENVQQVRAVYEHGEWRLHFVCRVEIDGAEPPGDGVAGIDLGICNLATVSYGDEAVVYPGGALKEDEYYFAKKRAETGDSASREAKRLDRKRTGRLTHFLHALSKDIISECVDRDIGTIVVGDLGGIREDENGDARNWGSHGNLDLHGWAFDRFTQMLSYKAEAESIDVVTTSERNTSKTCSACGRSDKRQRVHRGLYVCECGFVGNADCNGAENIRQKVLPNPPPEDRDNGWLAQPAVRLFDRSEGRFAPREQATQTDCEP

SEQ ID NO: 4788 - protein, 422 aa, unidentified
MLETTRTYRAKIVNHSQVSDDLDDCGHSASKLWNVARYHIQQEWDDTGEIPSEADLKRELKDHERYSDLHSQSSQRVLEELAESFTGWFKKRKNGDTDANPPGYRKRGDNHPRSTVTWKQNGIKHDSKHNQLRLSKGFNLKNHRSDFILVEYETRPDVTVGNIQQVRAVWNGDRWELHLVCKVEIPVEDAPGDNTAGIDLGISNYLAIAYDDGDAELYPGNVLKQDKHYFTRDEYDTEGKNGPSRRALRARQKLSRRKDHFLHALAKHVVERCIDHKVGRIAIGDLGDIREDENGDSRSWGKRGNKKLHGWEFDRFTTLLEYKAEEHGILVDRTSERDTSKTCSCCGRKRDANRVERGLYVCESCGVTMNADVNGAVNIRRKITQNPPTGDMSNGRLARPVAYLFNQTSGRFAPSEQVGCEP

SEQ ID NO: 4789 - protein, 405 aa, unidentified
MQRLQAFKFELMSTGAQQRDMRRFAGACRFVFNKALALQKENYEAGGKFIGYVAMAKRLTEWRNGSETPWLKDSPVHPLQHALKDLERAYKNFFAKRAAFPKFKKRGQRDSFRYPDPKQIKLDQANSRVFLPKLGWLRYRNSREVLGAVRNATVSLSAGKWFVSIQTEREVEQPVPQATSAVGIDMGIARFATMSDGSFLAPLNCFKRHEARLRRAQRAMSRKVKFGNNWKKAKSRIQRIHARIGNARRDYLHKATTAISQNHAMVCIEDLQVRNMSKSAAGSTDAPGKSIRAKSGLNKSILDQGWFEFRRQLDYKVAWNGGWLVAVPPQNTSRTCPACDCVSEDNRKTQANFACVGCGFEENADIVGAINILARGHRVAACGEPVRSGRSAKQEPAEAAVQLTA

SEQ ID NO: 4790 - protein, 489 aa, unidentified
MTKENPSNYKTLQIWIKKGHRMYSYFQECCHNAKNMYNTTNFYIRQVYTGLTQEKELQPLQKEVLDNIHKNIGKMNDTQLLAYQKKLEKEKLKPKEEQKEITCNLFSEPNFEKPYVDYNFLDALFKAMIQNDYRALPTQCSQSIMKGLFQNWKSFFASLKDYKKNPNKYDGMPRIPKYIRSSEKEILYTNQDCIIKNGRFLKFPKTKLQLNIGKLGFTEGKLKQVRVIPKYNEYVVELVIDVPSEQQMIEENARYMSIDLGIDNLATIVTNTGMKPVLVKGKHVKSINQYYNKMKSHFTSILRNGKQTNEGPFTSKRIEKLHQKRYLKIKDVFHKVSHHIVKLAQEEEVCKIVIGQNKSWKQETNMGKRNNQSFSHIPHNLLIQMITYKANAVGIQVVVTEESYTSKASFLDNDFIPTYGENDQNTTFSGKRIKRGIYRSANKTLINADVNAAANILRKVIPNAWTNGIEGLGVKQLANVLTPLTLIVR

SEQ ID NO: 4791 - protein, 486 aa, unidentified
MQQDKRYRTYQMWIKPGHRLFPYFQGLCGQSKNLYNTTNFFIRQAYTALTQDKELQPLQQEVLDTLHYWIDKMNEAKLLAYEKKVAKELLKSADERKRVKPTLFSLPKKESPMVSYFFLDALFKAMGQENYRSLPTQSSQNIMKGVFQNWKSFFASRKAYQKNPEAFTGMPRIPKYFRTLQKEVILTNQDCVIKEGKYLKLPFTKHRLNIGKVGSTKGNLMQVRVIPSYGRYVVECVFSCESHPQEHPLDRVMAIDLGIDNLATIVTNTGKTPTLVKGKAVKSINQFYNKQKAYYLGILRQGKQPNEGQKTSHCLERLHRKRFLKIKDFFHKASHHIVQIALQEKIGTIVIGHNTHWKSESNMGKRNNQSFCHIPHTLLIQMIVYKAKHLGIETIVREESYTSKASFLDGDEAPTYGEKGTKKSFSGKRIHRGMYRSAKGTLINADVNGAYNILRKEVPNAFANGIEGLDSLLAVAVSTPLVLIVR

SEQ ID NO: 4792 - protein, 422 aa, unidentified
MLETTRTYRAKIVNHHQVSDDLDDCGHSASKLWNVARYHIQQEWDDTGEIPSEADLKRELKDHERYSDLHSQSSQRVLEELAESFTGWFKKRKNGDTDAHPPGYRKRGDNHPRSTVTWKQNGIKHDSKHNKLRLSKGFNLKNHRSDFILAEYETRPDVTVETIQQVRAVWNGDRWELHLVCKVEIPVEAAPGDNTAGIDLGINNYLAIAYDDGDARLYPGNVLKQDKHYFTRDEYDTEGKNGPSRRALRTRQKLSRRKDHFLHALSKHIVEQCIDHEVGRIAIGDLSQIREDKNGDSRNWGKRGNKKLHGWEFDRFTHLLEYKAEEHGILVDRTSERDTSKTCSCCGQKRDANRVERGLYVCESCGATMNADVNGAVNIRRKITQNPPSEDMSNGRLARPVAYLFNQSSGRFAPSEQVSCKS

SEQ ID NO: 4793 - protein, 400 aa, unidentified
MQRLQAFKFELMPTGEQQRDMRRFAGSCRFVYNKALALQRDNYAAGGKFISYVAMAKHLTAWRNGSETAWLKDSPVHPLQHALKDLERAYKNFFGKCAAFPRFKKKGKSDRFRYPDPKQIKLDQGNSRIFLPKLGWLRYRNSRRVLGELRNATVSQSAGKWFVSIQTQREVDRPVPQATSAVGIDVGIARFATMSDGTFVAPLNSFKRHEARLRRAQRAMSRKVKFSSNWKKAKARIQSIHSRIGNARRDYLHKATTTISNSHAMVCIEDLQVRNMSRSAAGNTEDPGKNVRTKSGLNKAILDQGWFEFRRQLDYKLAWNGGRLIAVPPANTSRTCPACACVSAENRLTQARFACIECGFEENADVVGAINVLARGHRVAACGEPAQSGRSVKQEPAEAI

SEQ ID NO: 4794 - protein, 449 aa, unidentified
MEKDPAALTDNERGVLDEIARALPVMNAAGKQPTEAGDRYKMPAQGKSFLSYPFLEALLRASNNPDFLCGKLPRQAAQAVLKDCVQEMKSYYAAKREYKRDPGKFRGEPKFPGYNKPSGCCTTTLTNQDCILYDAGRGVHELKLPLTRERLSLGKAPIHGRLKQVKVIPTHGIFVISLTTEVKGELPEPAEVPQRIIGTDLGVNNFSAITNNLGKPCLLFKGGVAKSANQWYNKQMAALVSEQTSRTGAKFVPTPEARMLELRRDNYLSDYMNKVAKLVIRWCVENQVDTIVVGVNKDWKQGSHMGSQNNQSFVSLPFAKFRWQLQYRVERLGIRHIKHEESYTSKASFLDGDFIPVHGEAGADQVKFSGRRFKRGLYRSKSGQVLNSDFNGSAHTTRFARVATRSGRRSWMPLSGASCPTSAECGHPRLLILVTFGESHVASIETPSK

SEQ ID NO: 4795 - protein, 489 aa, unidentified
MAKENPSNYKTLQIWIKKGHRMYSYFQECCHNAKNMYNTTNFYIRQVYTGLTQEKELQPLQKEVLANIHKNIGKMNDTQLLAYQKKLEKEKLKPKEEQKEITCNLFSEPNFEKPYVDYNFLDALFKAMIQNDYRALPTQCSQSIMKGVFQNWKSFFASLKDYKKNPNKYAGMPRIPKYIRSSEKEILYTNQDCIIKNGRFLKFPKTKLQLNIGKLGFTEGKLKQVRVIPKYNEYVVELVIDVPSEQQMIEENARYMSIDLGIDNLATIVTNTGMKPVLVKGKHVKSINQYYNKMKSHFTSVLRNGKQTNERPFTSKRIEKLHQKRYLKIKDVFHKVSHHIVKLAQEEEVCKIVIGQNKNWKQETNMGKRNNQSFCHIPHSLLIQMITYKANAVGIQVVVTEESYTSKASFLDNDFIPTYGENDQNTTFSGKRIKRGIYRSANKTLINADVNAAANILRKVIPNAWTNGIEGLGVKQLANVLTPLTLIVR

SEQ ID NO: 4796 - protein, 489 aa, unidentified
MTKENPSNYKTLQIWIKKGHRMYSYFQECCHNAKNMYNTTNFYIRQVYTGLTQEKELQPLQKEVLDHIHKNIGKMNDTQRLAYQKKLEKEKLKPKEEQKEITCNLFSEPNFEKPYVDYNFLDALFKAMIQNDYRALPTQCSQSIMKGLFQNWKSFFASLKDYKKNPNKYAGPPRIPKYIRSSEKEILYTNQDCIIKNDRFLKFPKTKLQLNIGKLGFTEGKLKQVRVIPKYNEYVVELVIDVPSEQQMIEENARYMSIDLGIDNLATIVTNTGMKPVLVKGKHVKSINQYYNKMKSHFTSVLRNGKQTNEGPFTSKRIEKLHQKRYLKIKDVFHKVSHHIVKLAQEEEVCKIVIGQNKSWKQETNMGKRNNQTFCHIPHSLLIQMITYKANAVGIQVVVTEESYTSKASFLDNDFIPTYGENDQNTTFSGKRIERGIYRSANKTLIHADVNAAANILRKVIPNAWTNGIEGLGVKQLANVLTPLTLIVR

SEQ ID NO: 4797 - protein, 413 aa, unidentified
MKLSFKFRPNINPTQLEIIEELSYHTTKLYNIISYDLRKNGFKNYYEIEKLYKNNWHCDFLHSHTRQQMFKILEQNWKSYFASIKDFGVNPSKYKGLPRPPKFKNTERNKNEIIFTNLAIRFQDGILKLSLSKSIQKLFKVDSLNFEVSNKLQSLINWNRLQQARFNYDKVQKCWYLIVIYNKDEVENSNDNVMSIDIGLDNLATITFKNGINQYVYCGKKLKSVNSYANKRIAYLQAIEMKKYGSDKFKNTKEIDRLRKYRNNYINDYLHKVSKNIIDKAIKNNVGKIVIGKLKDIKQDMNYNKSFVQIPIQRLVELITYKAKLKGIEIKLQEESYTSGCSAIDLEPVTKKYYNKSRRITRGLFKSGYGILNADINGSLNILRKSEKCIPDLVNAMRDKGNWTHPQRIRIAC

SEQ ID NO: 4798 - protein, 418 aa, unidentified
MLDTTRTYVAKITNHSQVRGDLDQCGFSASKLWNVGRYYIQGRWDEDGEIPDEAELKSELKDHERYSDLHSQSSQRVLEELAEAFTGWYNSENGNNPPGYRKRGDRHPRATVTWKQKGIKHDAKHGQIRLSKGWNLKDGRSDFILAEYETRPDVEINNIQQVRAVWNGDEWELHLVCKKEIPVEDAPGEKVAGIDLGISNYLAIDYEDCPSELYPGNVLKEDKHYFTRDEYQTEGETGPSKRARKARRKLSRRKDHFLHTLSKHIVQRCVEEGVGKIAVGDLSDIREDEDGDSRNWGQSGNKKLHGWEFDRFVRLLEYKAEEYGLLVDRVGEKNTSKTCSCCGQIRESNRVERGLYFCSSCETTMNADVNGAVNIRRKITQSPPTGDMSNGWLAQPGVFLFDRESGSFNTREQGDCKP

SEQ ID NO: 4799 - protein, 417 aa, unidentified
MANQVTRTYVASVRNHQQVRADLDSLGFAASKLWNIARWTCDRIWEETGTIPDHGTLKAYLKNHERYADLNAQSSQAILEELAEAFDSWYVHRENGNGNANPPGYRKHGDDHPRSTVTFKEDGFKHDSDHDRIRLSKGRNLKDGRSDFILCEYAADPDVDVKNVQQVRAVWSGDEWELHIVCRVEIEDVDSPGDRVAGIDLGICNFAAVAVGDDALLYPGGALKEDDYYFQKERAKCDDSGSQKARRLNRKRDQRRTHFFHAVSADIVAECAARNVGKIAVGDLSGIREDTDWGDHGNLDLHGWTFDRFTEMLEYKAAERGISVERIGERDTSKSCATCGFTDDSQRVERGLYVCESCETVANADVNGAENIRQKVLPSLACDGGDRDNGWMAQPAVRLFDKSTGRVAPQEQVRREP

SEQ ID NO: 4800 - protein, 424 aa, unidentified
MADSRLVTRTYRARVRNHSQVRDDLDSLGFAASKLWNVARYTVGRVWDACGQIPSSFDLQAYLKSHERYAGLHSQSSQRVLAELAEAFTGWYGHRNDGNRRANPPGYRKHGDDHPRSTVTFKQAGFKHDAANNRLRLSKGSNLKDGWGDFILCEYDVIGPRGTTVENVQQVRAVYERGVWRLHIVCKVQVEVAEPPGDRTVGVDLGICNFAVVSFGDESLLYPGGSLKEDEYYFAKQRAKCDDSFSREAQRLNRKRTDRRTHFLHTLSKAIVAECAERGVGTVFVGDLGGIRDDENGDPADWGRHGNLDLHGWAFDRFTTMLTYKAEMRGIAVETVSERDTSKTCSACGAKADSQRVERGLYVCDECGTVANADTNGAENIRQKSTSESSHEDRSTGWLAQPAVRLFDKTRGAFLPRERATREP

SEQ ID NO: 4801 - protein, 424 aa, unidentified
MANRTVTRTHVASIRNQRQVRDDLDSLGFAASKLWNVARWTAERIWSETGYIPGHAELSSYLKSHERYADLNAQSSQRVMQELAEAFKSWYGHRQNGNSKANPPAYRKRGDEHPRSTVTFKQDGFKHDAENGRVRLSKGRNLKDGWSDFILCEYDADPDVDIENVQQVRAVYNRDEWRLHFVCRKTIDPEPSGDKTAGIDLDICNFAAVSFGGESLLYPGGALKEDEYWFQKERAKCDNSASTEAERLDRKRTDRRTHFLHALSKDIVAECVGRGVGTVAVGDLSGIREGEDTGAPRNWGDSGNLALHGWAFDRFTQMLEYKAEAEGINVEQVDERGTSKTCSACDTENGSQRVERGLYVCESCETVANVDINGAENIREKVLPSLAPDGGDRDNGWMAQPAVRLFDTSTGRVRPQEQVVDREP

SEQ ID NO: 4802 - protein, 417 aa, unidentified
MANQVTRTYVASIRNYQQVRVGLDSLGFAASKLWNVARWTCDRIWDETGTIPDHGTLKAYLKSHERYADLNAQSSQAILEELAEAFDSWYAHRENGNENANPPGYRKHGDDHPRSTVTFKEDGFKHDPKHNRIRLSKGRNLKDGRSDFILCEYAANPDVDVQNVQQVRAVRNGKKWELHIVCRVEIENAAAPGDRVAGIDLGICNFAAVAVGDEALLYPGGALKEDDYYFQKKRAKCDDSDSQKARRLDRKRDERRTHFLHAVSTDIVAECAARNVGMIAVGDLSGIREDTDWGDHGNLDLHGWAFDRFTEMLEYKAAERGITVERVDERDTSKSCACCETTDDSQRVERGLYVCDDCGLAANADVNGAENIRQKVLPSLACDGGDRDNGWMAQPAVRLFDKSTGQVRPQEQVCREP

SEQ ID NO: 4803 - protein, 424 aa, unidentified
MANQTVTRTHVASIRNQRQVRDDLDSLGFAASKLWNVARWTAERIWSETGYIPGHAELSSYLKSHERYADLNAQSSQRVMQELAEAFKSWYGHRQNGNSKANPPAYRKRGDEHPRSTVTFKQDGFKHDAENGRVRLSKGRNLKDGWSDFILCEYDADPDVDIENVQQVRAVYNRDEWRLHFVCRKTIDPEPSGDKTAGIDLGICNFAAVSFGGESLLYPGGALKEDEYWFQKERAKCDNSASTEAERLDRKRTDRRTHFLHALSKDIVAECVGRGVGTVAVGDLSGIREGEDTGAPRNWGDSGNLALHGWAFDRFTQMLEYKAEAEGINVEQVDERGASKTCSACDTENGSQRVERGLYVCESCETVANADINGAENIREKVLPSLAPDGGDRDNGWMAQPAVRLFDKTTGRVRPQEQVVDREP

SEQ ID NO: 4804 - protein, 489 aa, unidentified
MTKENPSNYKTLQIWIKKGHRMYSYFQECCHNAKNMYNTTNFYIRQVYTGLTQEKELQPLQKEVLDNIHKNIGKMNDTQLLAYQKKLEKEKLKPKEEQKEITCNLFSEPNFENPYVDYNFLDALFKAMIQNDYRALPTQCSQSIMKGLFQNWKSFFASLKDYKKNPNKYAGMPRIPKYIRSSEKEILYTNQDCIIKNSRFLKFPKTKLQLNIGKLGFTEGKLKQVRVIPKYNEYVVELVIDVPSEQQMIEENARYMSIDLGIDNLATIVTNTGMKPVLVKGKHVKSINQYYNKMKIHFTSILRNGKQTNEGPFTSKRIEKLHQKRYLKIKDVFHKVSHHIVKLAQEEEVCKIVIGQNKSWKQETNMGKRNNQSFCHIPHNLLIQMITYKANAVGIQVVVTEESYTSKASFLDNDFIPTFGENDQNTTFSGKRIERGIYRSANKTLINADVNAAANILRKVIPNAWTNGIEGLGVKQLANVLTPLTLIVR

SEQ ID NO: 4805 - protein, 413 aa, unidentified
MPTQTLTARAKVINLSDRDALLLGLLGFFATKLWNVANHHRRTVWNVTGRIPGFAEQCRELKINRWYRLLPSQSAQEVLGEQDDSYRSWFSHRKNGDVLAKPPGFRKKDTLSTVTFKQNAFEILPGNRVRLKLPKTYGRRVIVLEYQLPSHVTLSKVQQVKLVYEPGTGDWYLHITHRVPVTYKETGNVMALDLGIVNIAAGVISDGFSFLVPGGELLALDRYFQKEKAKCTKSTSRRCIELNVKWGRQRNHYMHVLTRWLVDLAVAHNVFTIVVGELKGIRADRDWGDAGNQKLHAWPFSKIMSLLTYKAALAGIRVVKVSEKNTSTTCPVCGKRVKKARVHRGLFIHCGVVLNADLVGAYNILQRYLRESGLALPDRSGVVGALARPAVNLFVWRKTTSPGREQGTFRQAA

SEQ ID NO: 4806 - protein, 413 aa, unidentified
MPTQTLTARAKVINLSDRDALLLGLLGFFATKLWNVANHHRRTVWNETGRIPGFVEQCRELKINRWYRLLPSQSAQEVLGEQDDSYRSWFSHRKNGDVLAKPPGFRKKDTLSTVTFKQNAFETLPDNRVRLKLPKTYGRRVIVLEYQLPSHVTLSKVQQVKLVYEPGTGDWYLHITHRVPVTYKETGNVMALDLGIVNIAAGVISDGFSFLVPGGELLALDRYFQKEKAKCTKSTSRRCIELNVKWGRQRNHYLHVLTRWLVDLAVAHNVFTIAVGELKGIRADREWGDAGNQKLHAWPFSKIISLLTYKAALAGIRVVKVSEKNTSTTCPACGERGKKARVHRGLFVHCGVVLNADLVGAYNILQRYLRESGLALPDRSGVVGALARPAVNLFVWRKTTPSGREQGTFGQAA

SEQ ID NO: 4807 - protein, 426 aa, unidentified
MIELARKKKFSNGMPTQTLTARAKVINLSDRDALLLGLLGFFATKLWNVANHHRRTVWNETGRIPGFVEQCRELKINRWYRLLPSQSAQEVLGEQDDSYRSWFSHRKNGDVLAKPPGFRKKDTLSTVTFKQNAFETLPDNRVRLKLPKTYGRRVIVLEYQLPSHVTLSKVQQVKLVYEPGTGDWYLHITHRVPVTYKETGNVMALDLGIVNIAAGVISDGFSFLVPGGELLALDRYFQKEKAKCTKSTSRRCIELNVKWGRQRNHYLHVLTRWLVDLAVAHNVFTIVVGELKGIRADREWGDAGNQKLHAWPFSKIISLLTYKAALAGIRVVKVSEKNTSTTCPACGERGKKARVHRGLFVHCGVVLNADLVGAYNILQRYLRESGLALPDRSGVVGALARPAVNLFVWRKTTPSGREQGTFGQAA

SEQ ID NO: 4808 - protein, 426 aa, unidentified
MIELARKKKFSNGMPTQTLTARAKVINLSDRDALLLGLLGFFATKLWNVANHHRRTVWNETGRIPGFVEQCRELKINRWYRLLPSQSAQEVLGEQDDSYRSWFSHRKNGDVLAKPPGFRKKDTLSTVTFKQNAFETLPDNRVRLKLPKTYGRRVIVLEYQLPSHVTLSKVQQVKLVYEPGTGDWYLHITHRVPVTYKETGNVMALDLGIVNIAAGVISDGFSFLVPGGELLALDRYFQKEKAKCTKSTSRRCIELNVKWGRQRNHYLHVLTRWLVDLAVAHNVFTIAVGELKGIRADREWGDAGNQKLHAWPFSKIISLLTYKAALAGIRVVKVSEKNTSTTCPACGERGKKARVHRGLFVHCGVVLNADLVGAYNILQRYLRESGLALPDRSGVVGALARPAVNLFVWRKTTPSGREQGTFGQAA

SEQ ID NO: 4809 - protein, 426 aa, unidentified
MIELARKKKSSNGMPTQTLTARAKVINLSDRDALLLGLLGFFATKLWNVANHHRRTVWNVTGRIPGFAEQCRELKINRWYRLLPSQSAQEVLGEQDDSYRSWFSHRKNGDVLAKPPGFRKKDTLSTVTFKQNAFEILPGNRVRLKLPKTYGRRVIVLEYQLPSHVTLSKVQQVKLVYEPGTGDWYLHITHRVPVTYKETGNVMALDLGIVNIAAGVISDGFSFLVPGGELLALDRYFQKEKAKCTKSTSRRCIELNVKWGRQRNHYMHVLTRWLVDLAVAHNVFTIVVGELKGIRADRDWGDAGNQKLHAWPFSKIMSLLTYKAALAGIRVVKVSEKNTSTTCPVCGKRVKKARVHRGLFIHCGVVLNADLVGAYNILQRYLRESGLALPDRSGVVGALARPAVNLFVWRKTTSPGREQGTFRQAA

SEQ ID NO: 4810 - protein, 548 aa, unidentified
MRTVMVDIKQNHPAVSYFEKNTTGSRAVRNTANFLIRNTMTGLCKSPEERTHMETEVLHTVFTGIQKANAYKDIQEGKAISAAFQKVKSGELAGLKAHAYLKSKLDSCGKRFSYPTMDHWFLSYEVLDAVLKHTGNTAYYSCTSQVNQQAIRKTVASWKAYFKALKDWKKNPGKYQAKPRIPGYIREHKATAHFTNQVCRMVRTGGRLYLSFANCKQPVHIGRETLIPGKYVKTEIKPFCGRYRICITYEDVFQEPELPADPKRILGLDIGLENFLAGASNTGARPFLIRGGWLKSLNQWFNKRRAKLLSTLTRGDDSQHSRKHSHALDALSRNRNNHIRDFFYKAAHWVMRWCISHQIEVIVIGHTKGMKQEINIGKANNQNFVTIPYERFLRVLKTVSCKYGVPVVEREESYTSQASLLDLDAIPTYGDGDEESVFSGERIKRGLYRSSDGRLIHADINGAGNIARKEYPHMFDEMDMGYLCDTVDVVTGEKILNIKRHKSRKGYKKRKSPAAKARHESRKSKRLELRILLEVNPQIKTAKKQIAA

SEQ ID NO: 4811 - protein, 356 aa, unidentified
MEVNAWRRRRRDAPLVGYQQLCRELSASGPGTFGDLDTTGARSVLRRFSDAWFAAAKRRKAGDLSARFPRRRRGLVPVRWYHGTFTLDDRRVRLPTARGTSPLWVRLAREVPYPAEQVRSVTLLCEGGRLFLDVTAEVPVTVYPPGEQPDPGRVAGLDLGIIHPYAVAGPRGEGLLVSGRAIRAEHRMHLADTKARRRAVARRTPKPGQKGSRRWRQYRRRARLVEGRHRRRVRQAQHEAARSVVSWAVEQRVGVLHVGDPRGVLDIDAGRRHNLRLRQWQIGRLLQVLTDKATLAGITVRLVDERGTSSTCPACRRRVPKPRGRTLSCPHCRFSGHRDLVAAASIATRTPGGGPT

SEQ ID NO: 4812 - protein, 471 aa, unidentified
MPRRRDPALPRVVHRTARVAVRVTPGQRRRCFGLLRSAGDVWACVLEVNAWRRRRGGAPLVGYQQLCRELSGSGPGTFADLDSVGARSVLRRFSDAWFAAAKRRTAGDLSARFPRRRRGLVPVRWYHGTFTLDGRRVRIPTARGTAPLWVRLAREVPYPVEQVRSVTLLCEGGRLFLDVTAEVPVTVYPPGEQPDPGRVAGVDLGIIHPYAVAGPDGEGLLVSGRAIRAEHRMHLADTKARRRGVARRAPKPGEKGPRRWRKYRRRARLVEGRHRRRVRQAQHEAARSVVSWAVEQRVGVLHVGDPRGVLDIAAGRRHHLRLRQWQIGRLLQVLTDKPTLAGITVHLVDERGTSSTCPACGRRVPKPRGRTLSCRHCAFSGHRDLVVAASIATRTPGGGPTTLATVGLPEVVTHRRAGRHLPATGRSRRDPRRPRAARGSVGPRRPAPPPGGESLAHEARIHNTHRKPGER

SEQ ID NO: 4813 - protein, 619 aa, unidentified
MSSDIQSVPFSYIPYQKSPHKSNLSQLDHAYSIWYNINIVKDYLLNLSQCIFRRKEAYIMRTWKMIINPKKNKQDAAFCQYFKTNTADFKCMYNVANFYIRNTMTGIKKSPEERTHLETEVLHYVFTGIQKANEAIGQKRMKKKFEDLKLAQIGGMNCAVIAYSLASQEPFQYPTVKKWFLSYNTLDAIFKFTDNPVYKRMNSQVNQNAIRKVIAAWEGYFESLKQYKTNPAGYTGKPKIPGYKNTEESTAWFSKQVAKLKEEDGKSYLQFVNQKERFCIGKTSTYKGLQYVKTEIKPVYGRYCLLVTFDDNVKAVEPPVNPERILGLDPGVNNFLGVSNNFGAVPFVIKGGAVKSVNQRFNKRRSALLSALTKGSDSQHSVKYSEQLNTLSKKRDSFMRDYFYKCAWYVCRYAQAVGVEVIVMGYNEGQKQEITLGDKNNQHFVAIPYLKFITILKTVAAKCGIAVIVREESYASRASLLDMDDIPTYRQGDDVKYQFSGKRIHRGLYRSGNGTVMNADINGASNILRKEYSHAFDNVKDFAYLYETTLAIGYKDLYNNAKTISERPDGYRYHKAGFGSKACHKYRKWSRMKYRKLFGKSKSVWIANKMDKTQDKHAA

SEQ ID NO: 4814 - protein, 881 aa, unidentified
MHMQGKHAGSTVPKVLAFVHRPDHHASMERRQAFRFELMPKGEQPRQMSRSAGCARYVYNQALALKKERYEKQEKLTRFQLDKMLVEWKQETPWPSEAPAHALQQALLDLDRAYTKFFRKRAQFPKFHKKGVRDSFRESDPKCIKLDQVNRRIQLPKLGWVRYRKSREVLGEIPSVTVSLSAGQWFVSISTRREVEPPLHPSTSSVGLDWGVARFYTLSDGEYEDQLQPLKRFLPKLAKLERRLAGKKKWSSNWKKAKAKITKLHSKIAHIRKDFVHKASHDISKNHAVVFVEDLAVKNMSASARGTKAKPGKRVGQKSGFNRSILDASPFELRRQLAYKTQWKGGLLVPVPPQNTSRKCPRCGHTAAENRKTQTKFECFECGFSANADWVGAINIKEAGLASLACSSSSHARNASCQEPPRAWYARAYRACRNPLRSRRGGCQQSGIFGARARRAHTQNGRGNRGPGEYSMRDIAIVGGGQSGLQLALGLLQNNYKVTVVSNRTPEQIFNGRVTSSQFMFHDSLQNERDLGINSWEKKCPITEGIAFTIPGPNKTRALFWEAKLDHYGQSIDQRVKFAGWMKEFAKRGGDLVIKDAAPQDVDQVSKSHDMVIVAAGKGEINRMFERDAEKSPYDQPMRALALTYVKNMVPRKPFTAVSFNLIPGVGEYFVFPALTTTGPCEIMVFEGVPGGPMDCWNDVKTPEQHLAKSKWILETFMPLEADRCHKVELTDDNGILVGRFPPTVRKPICKLPSGRLAFGMADVVVTNDPITGQGSNTASKAAAIYLEQIVKRGNKAFDAQWMQQTFDIFWDYARWVVEWTNSLLIPPAPQILQLMGAATQVPSLAGKIANGFNNPPDYSPWWFDPAEADKLIKHVSAAAV

SEQ ID NO: 4815 - protein, 482 aa, unidentified
MVLGLVMPRRRDPAAPRVVYRTARVALRVTPGQRRRCFGLLRSAGDVWACVLEVNAWRRRRRDAPLSGYQELCRELAASGPGTFAELDSAGARSVLRRFSDAWFAAAKRRKDGDVSAGFPRRRRGLVPVRWHHGTFVLDGRRVRIPVGRGAAPLWVRLAREVPYPLEQVRSITLLCEGGRLFLDLSAEIPIATYPVGAGPDPGRVAGVDLGIIHPYAVTGPDGAGLLVSGRAIHAEHRMHLADTKARRRAVARRAPKPGQRGSRRWRKYRRRARMVEGRHRRRVRQAQHEAARSVVSWAVEQRIGELRVGDPRGVLDIEAGRRHNLRLRQWQVGRLLQVLTDKATLSGITLCLVNERGTSSTCPACQRRVPKPRGRTLSCPHCRFSGHRDLVAAATIATRSPGGGPTTPTAVVLSEVLTHRRAGRHLPGAGQSRRDPRRPRAARGSVGPRWPAPPLGGESLAHKARIHNDHRTPGERSWTPH

SEQ ID NO: 4816 - protein, 476 aa, unidentified
MHVIVFANHRHQFSLEIGADLGEDGEQPVDSISIEHAAAILRYKDHMDMYLKNAVSSMPNIVVVAHRPYYNIRMQRFQAFKYELRPDGQQERQIRRFAGSCRFVFNKALALQKERYERGEKKLGYAGLCKQLTEWRNSTETAWLADAPVHPLQQTLKDLERAYSNFFARRADFPRFKKKGQSDSFRYPDPKQIKLDQANSRVFLPKLGWLRYRNSRKVLGTVRNVTVSQSCGKWFVSIQTEREVEQPVPQATTAVGIDMGVTRFATLSDGTFYAPLNSFKRHETALRKAQQAMSRKTKFSNNWKKAKARVQRIHSRIGNARRDYLHKRSTTISQNHAMVCIENLQVRNMSKSAAGTADAPGRNVRAKSGLNKFILDQGWFEFRRQLDYKLAWNGGYLIAVPPQNTSRSCPCCGHVSAENRQTQARFECVECGFEENADLVGAINVLRAGHARFACEVSGAVMPPAAGTHRSDSGAA

SEQ ID NO: 4817 - protein, 471 aa, unidentified
MYCRTMEIGADLGEDGEQPVDSISIEHAAAILRYKDHMDMYLKNAVSSMPNIVVVAHRLYYNIRMQRFQAFKYELRPDGQQERQIRRFAGSCRFVFNKALALQKERYERGEKKLSYAGLCKLLTEWRNSTETAWLADAPVHPLQQTLKDLERAYSNFFARRADFPRFKKKGQSDSFRYPDPKQIKLDQANSRVFLPKLGWLRYRNSRKVLGTVRNVTVSQSCGKWFVSIQTEREVEQPVPQATTAVGIDMGVTRFATLSDGTFYAPLNSFKRHETALRKAQQAMSRKTKFSNNWKKAKARVQRIHSRIGNARRDYLHKCSTTISQNHAMVCIENLQVRNMSKSAAGTADAPGRNVRAKSGLNKSILDQGWFEFRRQLDYKLAWNGGYLIAVPPQNTSRSCPCCGHVSAENRQTQARFECVECGFEENADLVGAINVLRAGHARFACEVSGAVMPPAAGTHRSDSGAAQCRT

SEQ ID NO: 4818 - protein, 480 aa, unidentified
MHVIVFANHRHQFSLEIGADLGEDGEQPVDSISIEHAAAILRYKDHMDMYLKNAVSSMPNIVVIAHRPYYNIRMQRLQAFKYELRPDGQQERQIRRFTGSCRFVFNKALALQKERYERGEKKLGYAGLCKLLTEWRNSTETAWLADAPVHPLQQTLKDLERAYSNFFARRADFPRFKKKGQSDSFRYPDPKQIKLDQANSRVFLPKLGWLRYRNSRKVLGTVRNVTVSQSCGKWFVSIQTEREVEQPVPQAITAVGIDMGVTRFATLSDGTFYAPLNSFKRHETALRKAQQAMSRKTKFSNNWKKAKARVQRIHSRIGNARRDYLHKRSTTISQNHAMVCIENLQVRNMSKSAAGTADAPGRNVRAKSGLNKFILDQGWFEFRRQLDYKLAWNGGYLIAVPPQNTSRSCPCCGHVSAENRQTQARFECVECGFEENADLVGAINVLRAGHARFACEVSGAVMPPAAETHRSDSGAAQCRS

SEQ ID NO: 4819 - protein, 382 aa, unidentified
MRRFAGACRFVFNRALALQNENHEAGNKYIPYTKMASWLIEWKSHPDTQWLKDAPSQPLQQSLKDLERGYKNFFQKRAAFPRFKKRGQNDAFRYPQGVKLDQANNRISFPKLGWVRYRNSREVIGEVKNVTVSLSCDKWYVSIQTEYEVADPVHNAESMVGLDAGVTKLATLSDGTVYHPVNSFKANQRKLAMLQRQLSRKEKFSANWQKQKRKIQRHHSHIANIRRDYLHKVTSEISKNHAMIVIEDLKVSNMSKSAKGTSEQHGRNVRAKSGLNRSILDQGWYEMRRQLEYKQLWRGGQVLAIPPAYTSQRCACCGHTAKENRLSQSRFECLECGYTENADVNGARNILAAGHAVLACGGMVQSGHPLKQEPTEASQAPV

SEQ ID NO: 4820 - protein, 485 aa, unidentified
MEKGKETQYKTHQIWIKKGHRMYPYFKEMAQNAKNMTNTTNFYIRQVYTGLTQEKDLQPLQKEVLEIIEENLDNMNGVQKSSYVKKTEKEKTKPKEQQKSFTCHVFEAPSKAHPYVDYNFLDCLFKVTAQHDYRSLPTQTSQSIMKTVFQNWKSFFSSLKEYKKNPGKYKGRPRIPKYSRAQEKEVVFTNQDCVIKEKKFLKFPKTKERLNIGKLGAGEGKLKQVRVIPKYGQYVVELVVDVPLKKEEYQEINRLMAIDLGIDNLATMVTNTGSGPVLVKGKHVKSINQYYNKMKAHYFGILRRGKEPNEGPFTSNRLEKLHQIRHRKLKDLFHKVSFSIMKHAQEENIDTVIIGKNKDWKQCSTMGKRNNQSFVSIPHSLFIRMIQYKAKEQGIKVILTEESYTSKASFLDGDEIPTYGECETKKTFSGKRIKRGLYRSKAGIIINADVNGAANILKKTFLRLKGEDIFHKETIHVWHPQSKIV

SEQ ID NO: 4821 - protein, 485 aa, unidentified
MEKGKETHYKTHQIWIKKGHRMYPYFKEMAQNAKNMTNTTNFYIRQVYTGLTQEKELQPLQKEVLAIIEKNLDNMNGVQKSFYLKKIEKEKTKPKEQQKSFTCHVFEAPSKAHPYVDYNFLDCLFKVTAQHDYRSLPTQTSQSIMKTVFQNWKSFFSSLKEYKKNPAKYKGRPRIPKYSRASEKEVLFTNQDCVIKEKKFLKFPKTKERLNIGKLGAGEGKLKQVRVIPKYGQYVVELVMDVPLKKEECQEINRLMAIDLGIDNLATIVTNTGSGPVLVKGRHVKSINQYYNKMKAHYLGILRRGKQPNEGPFTSKRLEKLHQIRHQKLKDLFHKVSFSVIKHAQEENIDTIIIGKNNDWKQSSTIGKCNNQSFVSIPHSLFIRMIQYKAKEQGIKVIVTEESYTSKASFLDGDEIPTYGECESKKTFSGKRIKRGLYRSKAGFIINADVNGAANILKKAFLRLKEEAIFHKETIHVWHPQSKII

SEQ ID NO: 4822 - protein, 486 aa, unidentified
MEIGADLGEDGEQPVDSISIKHAAAILRYKDHMDMYLKNAVSSMPNIVVIAHRLYYNIRMQRLQAFKYELRPDGQQERQIRRFAGSCRFVFNKALALQKERYERGEKKLGYAGLCKLLTEWRNSTETAWLADAPVHPLQQTLKDLERAYSNFFARRADFPRFKKKGQSDSFRYPDPKQIKLDQANSRVFLPKLGWLRYRNSRKVLGTVRNVTVSQSCGKWFVSIQTEREVEQPVPQATTAVGIDMGVTRFATLSDGTFYAPLNSFKRHETALRKAQQAMSRKTKFSNNWKKAKARVQRIHSRIGNARRDYLHKCSTTISQNHAMVCIENLQVRNMSKSAAGTADAPGRNVQAKSGLNKSILDQGWFEFRRQLDYKLAWNGGYLIAVPPQNTSRSCPCCGHVSAENRQTQARFECVECGFEENADLVGAINVLRAGHARFACEVSGAVMPPAAGTHRSDQVRLNAAAERRRNLRPSGRGGCQHHQRL

SEQ ID NO: 4823 - protein, 466 aa, unidentified
MEIGADLGEDGEQPVDSISIEHAAAILRYKDHMDMYLKNAVSSMPNIVVVAHRPYYNIRMQRFQAFKYELRPDGQQERQIRRFAGSCRFVFNKALALQKERYERGEKKLGYAGLCKLLTEWRNSTETAWLADAPVHPLQQTLKDLERAYSNFFARRADFPRFKKKGQSDSFRYPDPKQIKLDQANSRVFLPKLGWLRYRNSRKVLGTVRNVTVSQSCGKWFVSIQTEREVEQPVPQATTAVGIDMGVTRFATLSDGTFYAPLNSFKRHETALRQAQQAMSRKTKFSNNWKKAKARVQRIHSRIGNARRDYLHKCSTTISQNHAMVCIENLQVRNMSKSAAGTADAPGRNVRAKSGLNKSILDQGWFEFRRQLDYKLAWNGGYLIAVPPQNTSRSCPCCGHVSAENRQTQARFECVECGFEENADLVGAINVLRAGHARFACEVSGAVMPPAAGTHRSDSGAAQCRT

SEQ ID NO: 4824 - protein, 480 aa, unidentified
MHVIVFAIHRHQFSLEIGADLGEDGEQPVDSISIEHAAAILRYKDHMDMYLKNAVSSMPNIVVVAHRPYYNIRMQRLQAFKYELRPDGQQERQIHRFAGSCRFVFNKALALQKERYERGEKKLGYAGLCKLLTEWRNSTETAWLADAPVHPLQQTLKDLERAYSNFFARRADFPRFKKKGQSDSFRYPDPKQIKLDQANSRVFLPKLGWLRYRNSRKVLGTVRNVTVSQSCGKWFVSIQTEREVEQPVPQATTAVGIDMGVTRFATLSDGTFYAPLNSFKRHETALRKAQQAMSRKTKFSNNWKKAKARVQRIHSRIGNARRDYLHKCSTTISQNHAMVCIENLQVRNMSKSAAGTADAPGRNVRAKSGLNKSILDQGWFEFRRQLDYKLAWNGGYLIAVPPQNTSRSCPCCGHVSAENRQTQARFECVECGFEENADLVGAINVLRAGHARFACEVSGAVMPPAAETHRSDSGAAQCRS

SEQ ID NO: 4825 - protein, 471 aa, unidentified
MYCRTMEIGADLGEDGEQPVDSISIEHAAAILRYKDHMDMYFKNAVSSMPNIVVVAHRPYYNIRMQRLQAFKYELRPDGQQERQIRRFAGSCRFVFNKALALQKERYERGEKKLGYTGLCKLLTEWRNSTETTWLADAPVHPLQQTLKDLERAYSNFFARRADFPRFKKKGQSDSFRYPDPKQIKLDQANSRVFLPKLGWLRYRNSRKVLGTVRNVTVSQSCGKWFVSIQTEREVEQPVPQATTAVGIDMGVTRFATLSDGTFYAPLNSFKRHETALRQAQQAMSRKTKFSNNWKKAKARVQRIHSRIGNARRDYLHKCSTTISQNHAMVCIENLQVRNMSKSAAGTADAPGRNVRAKSGLNKSILDQGWFEFRRQLDYKLAWNGGYLIAVPPQNTSRSCPCCGHVSAENRQTQARFECVECGFEENADLVGAINVLRAGHARFACEVSGAVMPPAAGTHRSDSGAAQCRT

SEQ ID NO: 4826 - protein, 471 aa, unidentified
MYCRTMEIGADLGEDGEQPVDSISIEHAAAILRYKDHMDMYLKNAVSSMPNIVVVAHRPYYNIRMQRLQAFKYELRPDGQQERQIRRFAGSCRFIFNKALALQKERYERGEKKLGYAGLCKLLTEWRNSTETAWLADAPVHPLQQTLKDLERAYSNFFARRADFPRFKKKGQSDSFRYPDPKQIKLDQANSRVFLPKLGWLRYRNSRKVLGTVRNVTVSQSCGKWFVSIQTEREVEQPVPQATTAVGIDMGVTRFATLSDGTFYAPLNSFKRHETALRKAQQAMSRKTKFSNNWKKAKARVQRIHSRIGNARRDYLHKCSTTISQNHAMVCIENLQVRNMSKSAAGTADAPGRNVRAKSGLNKSILDQGWFEFRRQLDYKLAWNGGYLIAVPPQNTSRSCPCCGHVSAENRQTQARFECVECGFEENADLVGAINVLRAGHARFACEVSGAVMPPAAGTHRSDSGAAQCRT

SEQ ID NO: 4827 - protein, 489 aa, unidentified
MPKKQAFIDKSGVKFVENFQKNQKIKKFPSRTEIRYLTAFMQKSHAAAILRYKDHMDMYLKNAVSSMPNIVVVAHRPYYNIRMQRLQAFKYELRPDGQQERQIRRFAGSCRFIFNKALALQKERYERGEKKLGYAGLCKLLTEWRNSTETAWLADAPVHPLQQTLKDLERAYSNFFARRADFPRFKKKGQSDSFRYPDPKQIKLDQANSRVFLPKLGWLRYRNSRKVLGTVRNVTVSQSCGKWFVSIQTEREVEQPVPQATTAVGIDMGVTRFATLSDGTFYAPLNSFKRHETALRKAQQAMSRKTKFSNNWKKAKARVQRIHSRIGNARRDYLHKCSTTISQNHAMVCIENLQVRNMSKSAAGTADAPGRNVRAKSGLNKSILDQGWFEFRRQLDYKLAWNGGYLIAVPPQNTSRSCPCCGHVSAENRQTQARFECVECGFEENADLVGAINVLRAGHARFACEVSGAVMPPAAGTHRSDSGAAQCRT

SEQ ID NO: 4828 - protein, 309 aa, unidentified
MPNIVVVAHRPYYNIRMQRLQAFKYELRPDGQQERQIRRFAGSCRFVFNKALALQKERYERGEKKLGYAGLCKLLTEWRNSTETAWLADAPVHPLQQTLKDLERAYSNFFARRADFPRFKKKGQSDSFRYPDPKQIKLDQANSRVFLPKLGWLRYRNSRKVLGTVRNVTVSQSCGKWFVSIQTEREVEQPVPQATTAVGIDMGVTRFATLSDGTFYAPLNSFKRHETALRQAQQAMSRKTKFSNNWKKAKARVQRIHSRIGNARRDYLHKCSTTISQNHAMVCIENLQVRNMSKSAAGTADAPGRNVRA

SEQ ID NO: 4829 - protein, 471 aa, unidentified
MYCRTMEIGADLGEDGAQPVDSISIEHAAAILRYKDHMDMYLKNAVSSMPNIVVVAHRPYYNIRMQRLQAFKYELRPDGQQERQIRRFAGSCRFVFNKALALQKERYERGEKKLGYAGLCKLLTEWRNSTETAWLADAPVHPLQQTLKDLERAYSNFFARRADFPRFKKKGQSDSFRYPDPKQIKLDQANSRVFLPKLGWLRYRNSRKVLGTVRNVTVSQSCGKWFVSIQTEREVEQPVPQATTAVGIDMGVTRFATLSDGTFYAPLNSFKRHETALRKAQQAMSRKTKFSNNWKKAKARVQRIHSRIGNARRDYLHKCSTTISQNHAMVCIENLQVRNMSKSAAGTADAPGRNVRAKSGLNKSILDQGWFEFRRQLDYKLAWNGGYLIAVPPQNTSRSCPCCGHVSAENRQTQARFECVECGFEENADLVGAINVLRAGHARFACEVSGAVMPPAAGTHRSDSGAAQCRT

SEQ ID NO: 4830 - protein, 412 aa, unidentified
MKRLQAFKYELMPNGEQQRAMRRFAGSCRFVFNKALALQQAHYAEGKKKLSYSDLCKHLTQWRKSSETPWLADTHSQALQQALKDLERAYKNFFEKRADFPRFKKKGQSDSFRYPQGSKLDQGNSRIFLPKLGWVRYRNSREVLGVVKNVTVSSKQGKWYVSIQTEREVETPIHPSTAIVGIDMGITRFATLSDGSYLVPLNGFKRQEKALAKAQRAMSRKQKFSNNWKKAKATVQKIHARIAHSRRDYLHKATTAISQNHAMVCIEDLQVRNMSKSASGTSALPGKNVKAKSGLNKAILDQSWFEFRRQLEYKLTWLGGELLAVNPRNTSRTCPCCGYVAKENRRSQACFKCMDCDFEENADVVGAINVLRAGHARLACAETSPVGKGVGPRTHRSESGDGRLNAVGIPVL

SEQ ID NO: 4831 - protein, 412 aa, unidentified
MKRLQAFKYELMPNGEQQRAMRRFAGSCRFVFNKALALQQAHYAEGKKKLSYSDLCKHLTQWRKSSETPWLADTHSQALQQVLKDLERAYKNFFEKRADFPRFKKKGQSDSFRYPQGSKLDQGNSRIFLPKLGWVRYRNSRDVLGVVKNVTVSSKQGKWYVSIQTEREVETPTHPSTAIVGIDMGITRFATLSDGSYLVPLNGFKRQEKALAKAQRAMSRKQKFSNNWKKAKATVQKIHARIANSRRDYLHKATTAISQNHAMVCIEDLQVRNMSKSASGTIAIPGKNVKAKSGLNKAILDQSWFEFRRQLEYKLTWLGGELLAVNPRNTSRTCPCCGYVAKENRRSQACFKCMDCDFEENADVVGAINVLRAGHARLACAETSPVGKGVGPRTHRSESGDGRLNVVGIPVL

SEQ ID NO: 4832 - protein, 485 aa, unidentified
MEVQNLKKDYRTYQINIKKGHRLYDYFNELCLNSSKLYNVTNFYIRQVYTALHSDKKLQPLQQEVMDTLQDNIEKMNEIQYYSHQKRLTKEKLKPMAERKELKPNLFGLPSKDKSFLSYNFLDCLFKVIKQQDYYSLPGQINQQVIRNVIQNWNGFFKSIKTYKTNPKNFKGKPSIPGYLSRDRKKETIFSNQICKIQDKKFLRFPKTKGRLNIGKLATFPGEFQQVRIIPKYNGFTVEVIFLVGVKKEIPAQKERCMGIDLGIDNIAAIAFNTGHSSMLFKGGVIKSINQRYNKMRGFYYAALRNGKKPKEGQFRSKILIKLDAKRHRKMKDFFHKVSHNIVKIAIETNVDTIIIGKNKDWKQKSNIGKRNNQRFVQIPHALLIELITYKANAKGIAVILTEESYTSQASFPDGDLIPTYKLGNQTHHQFSGKRIKRGLYQTKSKMRINADINAAANILRKVVPNAFANGIAAVCSQPRVVNVR

SEQ ID NO: 4833 - protein, 382 aa, unidentified
MRRFAGACRFVFNRALALQNENHEAGNKYIPYTKMASWLIEWKSHPDTQWLKDAPSQPLQQSLKDLERGYKNFFQKRATFPRFKKRGQNDAFRYPQGVKLDQANNRISLPKLGWVRYRNSREVIGEVKNVTVSLSCDKWYVSIQTEYEVADPVHNAESMVGLDAGVTKLATLSDGTVYHPVNSFKANQRKLAMLQRQLSRKEKFSANWQKQKRKIQRHHSHIANIRRDYLHKVTSEISKNHAMIVIEDLKVSNMSKSAKGTSEQHGRNVRAKSGLNRSILDQGWYEMRRQLEYKQLWRGGQVLAIPPAYTSQRCACCGHTAKENRLSQSRFECLECGYTENADVNGARNILAAGHAVLACGGMVQSGHPLKQEPTEASQAPV

SEQ ID NO: 4834 - protein, 424 aa, unidentified
MSRTIRTFEVTITNQRQVRDDLDQLGWAASKLWNVGRYYAQEQWDETGEIPDDGELKAELKGHERYTDLHSQSSQRVLEELAEAFNGWFGKRRNGDNRARPPGYRKNGDAHPRSTVSFKAAGFKHDAQFNRVRLSKGRNLKEHRSDFILCEYQTRPDVDLTEWEIQQVRAVHKRDRWRLQFVCRTTIDPEPPGDGVAGVDLGVCNFAAVSFGGESVLYPGGALKEDEYYFTKKKAKCDDSSSREATRLDRKRTGRRTHFLHSLSKAIVEQCVERGVRTLVVGDLGGIREDNENGDPRNWGDHGNLDLHGWAFDRFTTLLDYKAEAEGINVELVSERDTSKECSACGHTDDNQRVERGLYVCEKCDTVANADVNGAENIRQKVLPSLATDGGDRDNGWLAQPAVHLFERSEGCFAPREQVANREP

SEQ ID NO: 4835 - protein, 426 aa, unidentified
MAKQVVTRTYTASIRNQQQVSDDLDSLGFSASKLWNVGRWVCDRVWSEIGHIPGHNELTSYLKSHERYDDLHSQSSQRVLQELAEAFTGWYGKRRNGETRANPPKYRKHGNEHPRSTVTFKAAGFKLDTKYGRVRLSKGSNLKEYWSDFILCEYKTRPDVDLSTVESVQQVRAVWTGTEWKLQFVCKVEGKVSEAPGEKTVGVDLGINNFAALAYEDGHSELYPLNCLKQDDYYFSKRIARCGDSDSDQATRLNQKKSARRTYYFHALSKHIVQRCVEEGVGTIVVGDLSGIREDEGNNESKNWGKHGNLDLHSWAFDRFTSMLEYKAKMEGIAVERVSERDTSKSCSCCGRKRKANRVERGLYVCDDCGVVANADVNGAENIRQKVSPSSPSLSVNRSNGWLAQPSTLLFDKETGAFAPQEQVTS

SEQ ID NO: 4836 - protein, 489 aa, unidentified
MAKENPSNYKTLQIWIKKGHRMYSYFQEYCHNAKNMYNTTNFYIRQVYTGLTQEKELQPLQKEVLANIHKNIGKMNDTQLLAYQKKLEKEKLKPKEEQKEITCNLFSEPNFEKPYVDYNFLDALFKAMIQNDYRALPTQCSQSIMKGVFQNWKSFFASLKDYKKNPNKYAGMPRIPKYIRSSEKEILYTNQDCIIKNSRFLKFPKTKLQLNIGKLGFTEGKLKQVRVIPKYNEYVVELVIDVPSEQQMIEENARYMSIDLGIDNLATIVTNTGMKPVLVKGKHVKSINQYYNKMKSHFTSVLRNGKQTNERPFTSKRIEKLHQKRYLKIKDVFHKVSHHIVKLAQEEEVCKIVIGQNKNWKQETNMGKRNNQSFCHIPHSLLIQMITYKANAVGIQVVVTEESYTSKASFLDNDFIPTYGENDQNTTFSGKRIKRGIYRSANKTLIHADVNAAANILRKVIPNAWTNGIEGLGVKQLANVLTPLTLIVR

SEQ ID NO: 4837 - protein, 489 aa, unidentified
MAKENPSNYKTLQIWIKKGHRMYSYFQECCHNAKNMYNTTNFYIRQVYTGLTQEKELQPLQKEVLANIHKNIGKMNDTQLLAYQKKLEKEKLKPKEEQKEITCNLFSEPNFEKPYVDYNFLDALFKAMIQNDYRTLPTQCSQSIMKGLFQNWKSFFASLKDYKKNPNKYAGTPRIPKYIRSSEKEILYTNQDCIIKNGRFLKFPKTKLQLNIGKLGFTEGKLKQVRVIPKYNEYVVELVIDVPSEQQMIEENARYMSIDLGIDNLATIVTNTGMKPVLVKGKHVKSINQYYNKMKSHFTSILRNGKQTNEGPFTSKRIEKLHQKRYLKIKDVFHKVSHHIVKLAQEEEVCKIVIGQNKSWKQETNMGKRNNQSLCHIPHSLLIQMITYKANAVGIQVVVTEESYTSKASFLDNDFIPTYGENDQNTTFSGKRIKRGIYRSANKTLIHADVNAAANILRKVIPNAWTNGIEGLGVKQLANVLTPLTLIVR

SEQ ID NO: 4838 - protein, 529 aa, unidentified
MFLDIRYLMERRECVMRTWKINIQPTKDAVLCDYFAENTTAAKCMYNVANFYIRNTMTGIRKSPEERTACETEVLHYIFTGIQKANHHARENYEKKLKKYQDMHTKKGDKLAADLKCKVFPYPTREKWFLSYGVLDAIFKHTDNPTYRRMNSHVNQNAIKKAVRSWKSYFKAVRDYAVHPEKYKARPRIPGYKHAAEMTAAYTSQTAVFSCQDGHAYLKFVNHKQPVRIGKESLYADMTYAKTEVKPQYGGYTILVTFKEDIVLPEVPKQPKRILGIDVGVDNLAAVANNFGDMPFLIKGGALKSMNQKFNKQRAKLLSEVTKGSDSTHSRKETKRLQALSRKRDTFLRDFFYKTAWYLVRYAKKHQVDVIVIGHNEDQKQNIRIGKQNNQNFVSIPFCQFIKILRNTAAKAGIPVADREESYTSKASLLDLDAIPTYRKGNTQAYTFSGKRVHRGLYKTNRGCIINADINGAGNILRKEYPYAFDGQDMSYLYKTTKVVSYTDIYAGAKSVCKEKYNQKSHEPGWEAG

SEQ ID NO: 4839 - protein, 483 aa, unidentified
MRTWKIMIRPDKDAVLCRYFEENTTAAKCMYNAANFYIRNTMTGIRKSPEERTSHETEVLHYVFTGIQKANAHSYEVYCKKQEGYKKTGGMAGAVAMSKLKYKVVPYPTRDEWFLSYTVLDAIFKYTDHPTYRRMNSQVNQNAIKKTVKSWKSYFQLQKDYAIHPEKYKARPRIPGYIKQPAMTAAYTNQTAKFIRKDGHVYLRFVNHKPPVLIGKESLYSGMTYVKTEVKPQYGGYSILLTFKEDIVLPEVPKSPKRILGIDVGVDNFCAVANNFGDIPFLIKGGAIKSMNQNFNKERARLLSEVTKGSDSTHSKKETKRLHALSRKRETRLRDFFYKTAWYLVRYAKQQQAEVIVAGHNEDQKQNICIGRQNNQNFVAIPFCRFLDILRYTAAKAGIPVVIREESYTSRASLLDLDVIPTYKKGDVTNHTFSGKRVRRGLYKTNSGLFINADINGAGNILRKEYPYAYDGQELSYLYETTK

SEQ ID NO: 4840 - protein, 483 aa, unidentified
MRTWKINIQPTKDAVLCDYFAENTTAAKCMYNVANFYIRNTMTGIRKSPEERTACETEVLHYVFTGIQKANLHARENYEKKLKKYQDMHTEKGDKLAADLKCKVFPYPTKEKWFLSYGVLDAIFKYTDHPTYRRMNSQVNQNAIKKTVKSWKSYFQLQKDYAIHPEKYKARPRIPGYVKNLAMTAAYTNQTARFICKDGRAYLQFVNHRQPVLIGRESLYSDMTYVKTEVKPQYGGYSILLTFKEDIILPEVPKFPKRILGIDVGVDNFCAVANNFGDAPFLIKGGAVKSMNQNFNKERARLLSEVTKGSDSTHSKKETKRLHTLSRKRETRLRDFFYKTAWYLVRYAKQQQAEVIVAGHNEDQKQNICIGRQNNQNFVSIPFCRFLDILRYTAAKAGIPVVLREESYTSRASLLDLDVIPAYKKGDTTKHTFSGKRVRRGLYKTDRGLFINADINGAGNILRKEYPYAYDGQELSYLYETTK

SEQ ID NO: 4841 - protein, 374 aa, unidentified
HPEKYKARPRIPGYVKNLAMTAAYTNQTARFICKDGRAYLQFVNHRQPVLIGRESLYSDMTYVKTEVKPQYGGYSILLTFKEDIILPEVPKFPKRILGIDVGVDNFCAVANNFGDAPFLIKGGAVKSMNQNFNKERARLLSEVTKGSDSTHSKKETKRLHTLSRKRETRLRDFFYKTAWYLVRYAKQQQAEVIVAGHNEDQKQNICIGRQNNQNFVSIPFCRFLDILRYTAAKAGIPVVLREESYTSRASLLDLDVIPAYKKGDTTKHTFSGKRVRRGLYKTDRGLFINADINGAGNILRKEYPYAYDGQELSYLYETTKVVSYTDIYIGAKSLCNERYNGKNHQSGMGSRANHQYRKERRHHYRSLWGKSRAA

SEQ ID NO: 4842 - protein, 561 aa, unidentified
MRTFKMIISPTKNKKDAAFCQYFKTNTADSKCMYNTANFYIRNTMTGLKKSPEERTPLETEVLHYVFTGIQKANEVIGQKNMKKKFAELKLAEVGGMQSAVAAFSIVSHEPFQYPTAKKWFLSYGTLDAIFKFTDNPIYRRMNSQVNQNAIRKAVAAWQGYFESLKAYKKNPAGFTGKPKIPGYKQDEEYIAWFSKQVAKLKEEDGRYYIQFVNNPDRFEIGKASLYGDLKYVKTEVKAMYGKYYILITFDDKIAEVKVPENPKRILGLDPGVNNFLGVANNFGGAPFVMNGRAVKSENQRFNKKRAKLISSVTKGSNSKTSVKYSKQLNILSQRRESFLRDYFYKCAWYICRYAKAADVDVIVMGHNDGQKQEIDLTDNVNQDFVSIPYTKFITILKTVASKCGIAVVIREESYTSQASLLDMDDIPTYKKGKNKKYAFSGKRIHRGLYRSKNGTLLNADINGAANILRKEYPNAFDGIKDFTYLCITTISISYKDLYKNAKACAGRPKQYKYHKSGRYTVVRHMERSHKKCEYRKLWGKGKFGWRPDKNKQDTQQEKAA

SEQ ID NO: 4843 - protein, 561 aa, unidentified
MRTFKMIIDPTKNKKDAAFCQYFKKNTADSKCMYNTANFYIRNTMTGLKKSPEERTHLETEVLHYVFTGIQKANEVIGQKNMKKKFAKLNRSKVGGMNSAVIAFSIVSQEPFQYPTEEKWFLSYGTLDAIFKFTDNPVYRRMNSQVNQNAIRKAVTAWQGYFESLKAYRKNPAGFTGKPKIPGYKQDEEYIAWFSKQVAKLKEEDGRYYIQFVNNPDRFEIGKASLYSDLKYVKTEVKAMYGKYYILITFDDKIAEVEAPENPKRILGLDPGVNNFLGVANNFGGVPFVMNGRAVKSANQRFNKKRAKLISSVTKGSDSKSSVKYSKHLNILSQKRESFLRDYFYKCAWYICRYAKAAGVDVIVMGHNDGQKQEIDLKDNVNQNFVSIPYTKFITILKTVASKCGIAVVIREESYTSQASFLDMDDIPTYKKGENKEYAFSGKRIHRGLYRSKNGTLLNADINGAANILRKEYPNAFDGIKDFTYLCVTTISIGYKDLYRNAKACAGRPKQYKYHKSGKYTVVRHMERSHKKCEYCKLWGKGKFVWRPDKNKQDAQQVKAA

SEQ ID NO: 4844 - protein, 449 aa, unidentified
QYPTEEKWFLSYGTLDAIFKFTDNPVYRRMNSQVNQNAIRKAVAAWQGYFESLKAYRKNPAGFTGKPKIPGYKQDEEYIAWFSKQVAKLKEEDGRCYIQFINNPDRFGIGKASLYDDLKYVKTEVKPMYGKYYILITFDDKIAEAEVPENPKRILGLDPGVNNFLGVANNFGGAPFVMNGRAVKSANQRFNKKRAKLISSVTKGSDSKSSVKYSKQLNILSQRRESFLRDYFYKCAWYICRYAKAADVDVIVMGHNDGQKQEIDLADNVNQNFVSIPYTKFITILKAVASKCGIAVVIREESYTSQASLLDMDDIPTYKKGENKKYAFSGKRIHRGLYRSKNGTILNADINGAANILRKEYPNAFDGIKDFTYLCVTTISIGYKDLYRNAKVCAGKPKPYKYHKSGRCTVVRHMERSHKKCEYCKLWGKGKFVWRPDKNKQDAQQGKAA

SEQ ID NO: 4845 - protein, 561 aa, unidentified
MRTFKMIIDPTKNKKDAAFCQYFKTNTADSKCMYNTANFYIRNTMTGLKKSPEERTPLETEVLHYVFTGIQKANEVIGQKNMKKKFAELKLAEVGGMQSAVAAFSIVSHEPFQYPTAKKWFLSYGTLDAIFKFTDNPIYRRMNSQVNQNAIRKAVTAWQGYFESLKAYKKNPAGFTGKPKIPGYKQDEEYIAWFSKQVAKLKEEDGRYYIQFVNNPDRFEIGKASLYGDLKYVKTEVKAMYGKYYILITFDDKIAEVKVPENPKRILGLDPGVNNFLGVANNFGGAPFVMNGRAVKSENQRFNKKRAKLISSVTKGSNSKTSVKYSKQLNILSQRRESFLRDYFYKCAWYICRYAKAADVDVIVMGHNDGQKQEIDLTDNVNQDFVSIPYTKFITILKTVASKCGIAVVIREESYTSQASLLDMDDIPTYKKGKNKKYAFSGKRIHRGLYRSKNGTLLNADINGAANILRKEYPNAFDGIKDFTYLCITTISISYKDLYKNAKACAGRPKQYKYHKSGRYTVVRHMERSHKKCEYRKLWGKGKFGWRPDKNKQDTQQEKAA

SEQ ID NO: 4846 - protein, 561 aa, unidentified
MRTFKMIIDPTKNKKDAAFCQYFKTNTADSKCMYNTANFYIRNTMTGLKKSPEERTHLETEVLHYVFTGIQKANEVIGQKNMKKKFAELNLSKVGGMNSVVIAFSIVSQESFQYPTEEKWFLSYGTLDAIFKFTDNPVYRRMNSHVNQNAIRKAVAAWQGYFESLKAYRKNPAGFTGKPKIPGYKQDEGYIAWFSKQVAKLKEEDGRCYIQFINNPDRFGIGKASLYDDLKYVKTEVKPMYGKYYILITFDDKIAEVEVPENPKRILGLDPGVNNFLGAANNFGGAPFVMNGRAVKSANQRFNKKRAKLISSVTKGSDSKSSVKYSKQLNILSQRRESFLRDYFYKCAWYICRYAKAAGVDVIVMGHNDGQKQEIDLKDNVNQNFVSIPYTKFITILKTVASKCGIAVVIREESYTSQASLLDMDDIPTYKKGENKKYAFSGKRIHRGLYRSKSGTLLNADINGAANILRKEYPNAFDSIKDFAYLCVTTISIGYKDLYRNAKACAGRPKPYKYHKSGKYTVVRHIERSHKKCEYRKLLGKGKFVWRPDKNKQDTQQGKAA

SEQ ID NO: 4847 - protein, 572 aa, unidentified
MRTFKMIIDPTKNKKDAAFCQYFKTNTADSKCMYNTANFYIRNTMTGLKKSPEERTHLEIEVLHYVFTGIQKANEVIGQKNMKKKFTELKLAEVGGMNSAVIAFSIVSQEPFQYPTEEKWFLSYGTLDAIFKFTDNPVYRRMNSQVNQNAIRKAVAAWQGYFESLKAYRKNPAGFTGKPKIPGYKQDEEYIAWFSKQVAKLKEEDGRCYIQFINNPDRFGIGKASLYDDLKYVKTEVKPMYGKYYILITFDDKIAEAEVPENPKRILGLDPGVNNFLGVANNFGGAPFVMNGRAVKSANQRFNKKRAKLISSVTKGSDSKSSVKYSKQLNILSQRRESFLRDYFYKCAWYICRYAKAADVDVIVMGHNDGQKQEIDLADNVNQNFVSIPYTKFITILKAVASKCGIAVVIREESYTLQASLLDMDDIPTYKKGENKKYAFSGKRIHRGLYRSKNGTILNADINGAANILRKEYPNAFDGIKDFTYLCVTTISIGYKDLYRNAKVCAGRPKPYKYHKSGRCTVVRHMERSHKKCEYCKLWGKGKFVWRPDKNKQDAQQGKLRRYKKGNPRNRG

SEQ ID NO: 4848 - protein, 487 aa, unidentified
MVKEKQQEGKSYSTQQVWIKKGHRMYNYFQTMCENSKNMYNTTNFYIRQVFTALTSDNGRHPLQKEVIDTLVNHIEAMNEVQRVAYEKRLAKELAKPVEQRKEVKCNVFSLPDSSNPYVDYNFLDALFKRIAQNDYTSLPVQSSQAMMKKVFKDWKSYFAGLKDWKVNPSKYTGRPRIPRYSRASMKEVEFTNQDCVIKEKKYLKFPKTKERLNIGRLGCTANKLKCVRVIPRYEQLVVEIVFEKPKVDSKTKNESSRLMSIDLGIDNLATITTNTGMAPVLLKGKTIKSVNQYYNKMRAHYYGILRQGKEPKEGSFSSKRLLRLDAVRHRKIKDLFHKCSFFITELASFENIDTIIIGQNKGWKQHSNIGKKSNQQFVQIPYSLLISMIQYKAEELGMAVIVTEESYTSKASFLDGDDIPTYGEEGEKMFSGRRISRGLYRSKNKTIINADVNGSANIMRKYAKKEGLFLHIEDVLVDNPLSYTVA

SEQ ID NO: 4849 - protein, 422 aa, unidentified
MAKTSVTRTYRARVRNHSQVRDDLDSLGFAASKLWNVARWTVGRVWDACGQIPSAFDLQKYLKSHERYADLHSQSSQRVLAELAEAFTAWYGHRGNGNQNANPPGYRKHNDEHPRSTVTFKQAGFKHDAANQRIRLSKGSNLKDGWGDFILCEYDVIGPRGTTVENIQQVRAVYEHGVWRLHIVCKVPVEVAEAPGDRTASVDLGICNVAAISFGDGSLLYPGGTLKEDEYYFAKQRAKCDDSFSREARRLDRKRTDRRTHFFHTLSKEIVEQCAERGVGTVFVGDLGGIRDGDDGPKNWGRHGNLDLHGWAFDRFTTMLTYKAEIRGIAVETVSERDTSKTCSVCGTKADSQRVERGLYVCEECGTVANADTNGAENIRQQSTSESSHEDRSTGWLAQPAVRLFDKTRGGFLPPEQATREP

SEQ ID NO: 4850 - protein, 410 aa, unidentified
MSNYRTYIIHTCERTDELDAINELGGRIYSKTVSLVRKVNDRKDFWLSVGDAKKYLRCLEYPCHAHSVQAIIDDYYGALRSFFSRRKRDPKARPPYKTRKYHPFTWRATGISIQDDKMRLSMGKDRDAILIPVAKVFGKVAVEVSMIYNRKKRCFEFHATYQVKPTQHRPKKRSAVAVDMGEIHPISAFDGQQALIINGRFIRSVKQYRNKFLARINHKISRCKRGSHRWKVLKAAKNRVLTKIKNQIKDTEHKITSFFVSACRVNKAQTIVLGDIKHIRQSINYSKRSNQKLHQWSFGKISRMITYKAEQLGIEVKTESEKYTSQTCPSCKHKHKPSGRVYKCPKCGWTGHRDVVGASNIWTKYQGWVFNPVVGVLASPAGVRFTPHLRRLDSWSPFRGLISKKPVKNR

SEQ ID NO: 4851 - protein, 406 aa, unidentified
MTTLGRTLKLRLYPNTIQAIQLLEMSQEYQRLANLVSQWVFDHDFPLNSLKINHALYKKFRQESPLNSQMIQSVFRTVVARYKTVLEQLKQHPYRYQDDNKKWMSVTKDLTWLFKPLHFSRPQADLVRQSNYSFSCGLTEISLTTLGKRTKMPFTVKGFEHYFQKGWRLGTARLVHSRGKWYLHIGMTKKNADFDPTVPAQVVGIDRGLRFIATTVDQQEKTRFFDGKKILLKRHKFQKVRAELQHRGTKSAKKKLKQLQRRENRWMTDINHQLSKTLVALYGPQTLFVLEDLTNVTFNTNDLPKSLRNSHRSWAFFQLEAFLTYKAQAVQSQVLKVSPAFTSQRCPKCGLIEKTNRHHNIHEYHCQQCQYRSNDDRLGAMNIKMLGQEWLSGVKHPRIKKTTATG

SEQ ID NO: 4852 - protein, 406 aa, unidentified
MTTLGRTLKVRLYTNTIQATQLLDMSREYQRLANLVSQWVFDHDFPLNSLKINHALYKKFRQGSPLNSQMIQSVFRTVVARYKTVLEQLKQHPYRYQDEDKKWMRVAKDLTWLFKPLHFSRPQADLVRQSNYSFGNNLTEISLTTLGKRTKVPFTIKGFEQCFQTGWKLGTARLVHSGGKWYLHIGITKEDTDFDPTAPAQVVGIDRGLRFIATIFDQQRKTRFFDGKKILLKRHKFQKTRAELQHRGTKSAKKKLKQLQQRENRWMTDINHPLSKTLVTTYDPQTLFVLEDLTNVTFNTDDLPKSLRNSHRSWAFFQLETFLTYKGQAVQSQVLKVSPAFTSQRCPKCGLIEKTNRHHDIHEYHCQQCRYQSNDDRLGAMNIAMLGQEWLDGVKHPRIKKVTATG

SEQ ID NO: 4853 - protein, 486 aa, unidentified
MHDKGSYQTYQIWIKPGHRLFPYFQQLCQQAKSLYNTTNFFIRQVYTALTQGKELQPLQQEVMDLIHQHLDAMNENQFLAFQKKVVKESMKPEEQRKDVKANLLPLPTKEEPMLSYHFLDALFKAMGQENYRALPTQSSQNIMKVAFQNWKSFFALIKKYKSNPTSLSGKPRIPKYCRTPQKEFIFTNQDCEIRNHRFLKLPFTKQRLNIGKVGFTNGRLMQVRVIPSYGRYVVELIFTCDEQPQQHPLDRVMAIDLGIDNLATIVTNTGRTPTLVKGKVVKSINQYYNKQKAYFVGILRQGKKSHEGQKTSKRLERLHRKRFLKIKDIFHKASHAIVEIALQEQIGTIVIGHNTQWKSESNMGKRNNQSFCHIPHNLLIQMIRYKAKRSGMTTIVREESYTSKASFLDNDDIPTYGESDTIAIFSGKRIHRGMYRCANGTLINADVNGAYNILRKEVPKVFANGIEGLDGLSAVAVSTPLVLSVR

SEQ ID NO: 4854 - protein, 424 aa, unidentified
MSRTIRTFEARITNQQQVRDDLDQLGWAASKLWNVGRYYAQEQWDETGEIPDDGELKAELKSHERYTDLHSQSSQRILEELAEAFNGWFGKRRNGDDRARPPGYRKNGDSHPRSTVSFKAAGFKHDAQFTRVRLSKGRNLKEHRSDFILCEYQTRPDVDLTEWDIQQVRAVYKRDDWRLQFVCRTTIDPEPPGDGVAGVDLGICNFAAVSFGDESVLYPGGALKEDEYYFTKKKAKCDDSSSREATRLDRKRSGRRTHFLHALSKAIVEECVKRGVGTLVVGDLGGIRKDDENGEPRDWGDHGNLDLHGWAFDRFTTLLDYKAEAEGIDVELVSERDTSKSCSACGHTEDNQRVERGLYVCEKCDTVANADVNGAENIRQKVLPSLATDGGDRDNGWLAQPAVRLFDRDEGVFAPREQVVNREP

SEQ ID NO: 4855 - protein, 400 aa, unidentified
MQRLQAFKFELMPTGEQQRDMRRVAGSCRFVYNKALALQKENYDAGGKFINYVAMAKHLTAWRNGSETPWLKDSPVHPLQHALKDLERAYKNFFGKRAAFPRLKKKGKSDRFRYPDRKQIKLDQGNSRIFLPKLGWLRYRNSRGVLGELRNATVSRSAGKWFVSIQTQREVDPPVPQATRAVGIDVGVARFATMSDGTLLAPLNSFKQHEARLCRAQRAMSRKMKFSSNWKKAKARIQRIHSRIGNARRDYLHKATTTISNNHAMVCIEDLQVRNMSRSAAGNAENPGKNVRAKSGLNKAILDQGWSEFRRQLDYKLAWNGGWLIAVPPANTSRTCPACGCVSAENRLTQARFACIECGFEENADVVGAINVLARGHRVAACGEPVQSGPSVKQEPAEAI

SEQ ID NO: 4856 - protein, 400 aa, unidentified
MQRLQAFKFELMPNGEQQRKMRRFAGACRFVFNKALALQKQNYETGGKFIGYVAMAKHLTAWRNGTETPWLKDSPVHPLQHALKNLERAYKNFFAKRAAFPRFKKKGHSDSFRYPGSKQIKLDQVNNRIFLPKLGWLRYRNSRDVLGEVRNATVSRHAGKWVVSIQTAREVTQPVPLATSAIGVDLGIARFATLSDGSFLAPLNSFKRHEARLRHAQQAMSRKVKFSNNWKKAKARIQRIHAGIGNARRDYLHKATTTISKNHAMVCIEDLQVRNMSRSAAGSPDAPGKNVRAKSGLNKAILDQGWFEFRRQLDYKLAWNGGWLIAVPPANTSRTCPVCEYVSAENRQTQAVFRCVGCGHEDHADVVGAINILARGHRVAACGELVQSGRSVKQEPTEAI

SEQ ID NO: 4857 - protein, 400 aa, unidentified
MQRLQAFKFELMPNGEQQRKMRRFAGACRFVFNKALALQKQNYETGGKFIGYVAMAKHLTAWHNGTETPWLKDSPVHPLQHALKNLERAYKNFFAKRAAFPRFKKKGHSDSFRYPDSKQIKLDQVNNRIFLPKLGWLRYRNSRDVLGEVRNATVSRHAGKWVVSIQTAREVTQPVPLATSAIGVDLGIARFATLSDGSFLAPLNSFKRHEARLRHAQQAMSRKVKFSNNWKKAKARIQRIHAGIGNARRDYLHKATTTISKNHAMVCIEDLQVRNMSRSAAGSPDAPGKNVRAKSGLNKAILDQGWFEFRRQLDYKLAWNGGWLIAVPPANTSRTCPVCEYVSAENRQTQAVFRCVGCGHEDHADVVGAINILARGHRVAACGELVQSGRSVKQEPTEAI

SEQ ID NO: 4858 - protein, 400 aa, unidentified
MQRFQAFKFELMPNGEQQRKMRRFAGACRFVFNKALALQKENYDAGGKFIGYVAMSKHLTAWRNGTETPWLKDSPVHPLQHALKDLERAYKNFFAKRAAFPRFKKKGHSDSFRYPDSKQIKLDQVNSRIFLPKLGWLRYRNSRDVLGEVRNVTVSQYVGKWFVSIQTAREVEQPVPRATSAIGIDMGIARFATLSDGSFLAPLNSFKRHEIKLRQAQRVMSRKVKFSRNWKKAKARIQRIHARIGNARRDYLHKATTTISQNHAMVCIEDLRVRNMSRSAAGNSDAPGRSVRVKSRLNKAILDQGWFEFRRLLDNKLAWNGGWLIAVPPANTSRTCPVCTYMSAENRQTQAAFRCVGCGHEDHADVVGAINVLARGHRVAACGEPVQSGRSVKQEPAEAI

SEQ ID NO: 4859 - protein, 400 aa, unidentified
MRRLQAFKFELMPNGEQQRDMRRFAGSCRFVYNKALALQKENYEAGGKFIGYVAMAKHLTEWRNGGETPWLKDAPVHPLQHALKDMERAYKNFFAKRAAFPKFKKRGQRDSFRYPDPKQFKLDQPNGRIFLPKLGWMRLRLSRPVLGELRNATVSFNSGKWCVSIQTEREVEQPVPHATSVIGIDVGIARFATMSDGTFLAPLNSFKKHEARLRRCQRAMSRKVKFSNNWKKAKARVQRIHARIGNARRDYLHKATTTISKNHAMVCIEDLQVRNMSRSAAGSTDAPGKNVRAKSGLNKAILDQGWFEFRRQLEYKLARNGGWLVAVPPANTSRTCPVCGYVSADNRTTQEKFACVECSYAENADVVGALNILARGHRVAACGEPVQSGRSVKQEPAEAI

SEQ ID NO: 4860 - protein, 400 aa, unidentified
MQRLQAFKFELMPTGEQQRDMRRFAGSCRFVYNKALALQRDNYATGGKFISYVAMAKHLTAWRNGPETAWLKDSPVHPLQHALKDLERAYKNFFGKRAAFPRFKKKGKSDRFRYPDPKQIKLDQGNSRIFLPKLGWLRYRNSRRVLGELRNATVSQSAGKWFVSIQTQREVDRPVPQATSAVGIDVGIARFATMSDGTFVAPLNSFKRHEARLRHAQRAMSRKVKFSSNWKKAKARIQRIHSRIGNARRDYLHKATTTISNSHAMVCIEDLQVRNMSRSAAGNTEDPGKNVRTKSGLNKAILDQGWFEFRRQLDYKLAWNGGWLIAVPPANTSRTCPACACVSAENRLTQARFACIECGFEENADVVGAINVLARGHRVAACGEPAQSGRSVKQEPAEAI

SEQ ID NO: 4861 - protein, 400 aa, unidentified
MQRLQAFKFELMPTGEQQRDMRRFAGSCRFVYNKALALQRDNYAAGGKFISYVAMAKHLTAWRNGSETAWLKDSPVHPLQHALKDLERAYKNFFGKCAAFPRFKKKGKSDRFRYPDPKQIKLDQGNSRIFLPKLGWLRYRNSRRVLGELRNATVSQSAGKWFVSIQTQREVDRPVPQATSAVGIDVGIARFATMSDGTFVAPLNSFKRHEARLRRAQRAMSRKVKFSSNWKKAKARIQSIHSRIGNARRDYLHKATTTTSNSHAMVCIEDLQVRNMSRSAAGNTEDPGKNVRTKSGLNKAILDQGWFEFRRQLDYKLAWNGGWLIAVPPANTSRTCPACACVSAENRLTQARFACIECGFEENADVVGAINVLARGHRVAACGEPAQSGRSVKQEPAEAI

SEQ ID NO: 4862 - protein, 485 aa, unidentified
MGKVSYGWCWLRLVPRRRDPAAPRVVHRTARVALRLTPSQRRRCFGLLRSGGDVWACVLEINAWRRRRGDVPLTGYQELCRELAASGPGTFAGLDTTGARSVLRRFSDAWFAAAKRRKDGDLSAGFPRRRRGLVPVRWYHGTFTLDGRRVRISTARGTTPLWVRLARDLPYPLEQVRSITLLCEGGRLFLDVTAEVSVVVYPAGEEPDPGRVAGVDLGIIHPYAVAGPDGDGLLVSGRAIRAEHRMHLTDTKARRRAVARRAPKPGQKGSRRWRQYRRRARLVEGRHRRRVRQAQHEAARTVVSWAIRQRVGVLHVGDPRGVLNIAAGRRHNLRLRQWQIGRLLQVLTDKATLAGITVWLVNERGTSSTCPTCHQRVPKPRGRTLSCPHCQFSGHRDLVAAASIATRTPGGGPTTPAAVVLPLVVTHRRAGRHLPGAGQSRRDPRRPQQAARGSVGPRRPAPPPGGESLAHPARIHNTHRKPGER

SEQ ID NO: 4863 - protein, 553 aa, unidentified
MGTRHPCSASSGARGHGVGCGTPCARSQIRADRLARENPVPCLDASPAEPSRLVRCPLTFAGLAAGGFVVPVVLGLVVPRRRDPAAPRVVYRTARVALRVTPGQRRRCFGLLRSAGDVWACVLEVNAWRRRRRDAPLSGFQELCRELAASGPGTFAELDSTGARSVLRRFSDAWFAAAKRRKDGDVSAGFPRRRRGLVPVRWYHGTFALDGRQVRIPTGKGAAPLWVRLAREVPYPLEQVRSITLLCEGGRLFLDVSAEIPIATYPTGTGPNPARIAGVDLGIIHPYAVAGPDGAGLLVSGRAIRAEHRMHLADTKARRRAVARRAPKPGQRGSRRWRKHRRRARMVEGRHRRRVRQAQHEAARSVVSWAVERRIGELRVGDPRGVLDIKAGRRHNLRLRQWQIGRLLQVLTDKATLAGVTLRLVNERGTSSTCPACQRRVPKPRGRTLSCPHCRFSGHRDLVAAATIATRSPGGGPTTPTAVVLSEVLTHRRAGRHLPGAGQSRRDPRRPRTARGSVGPRRPAPPPGGESLAHKARIHNDHRTPGERSWTPH

SEQ ID NO: 4864 - protein, 405 aa, unidentified
MKRLQAFKYELQPNGEQARSMRRFAGSCRFVFNKALAMQKAIYEGGEKKVGYAGLCKELTTWKTQPETAWLKETHSQVLQQSLKDLERAYKNFFDKRADFPRFKKKGMGDSFRYPQGCKLDQSNSRVFLPKLGWLKYRNSRDVLGTVSNITVSANGGKWFVSIQTEREVEQPVHPATSIVGIDVGITRFATLSDGSHIEPLNTFRKHQQRLARYQRAMSRKTKFSSNWKKAKARVQKIHTRIANVRKDFLHKTTTTISKNHAIVCIEDLQVRNMSKSAAGSSDSPGRNVKAKSGLNKSILDQGWFEFRRQLEYKQVWLGGDVLAVPARNTSRTCPACGHVSADNRQTQAKFACVDCGYENNADVVGAINVLERGHRLLACGELAQSGRSVKQEPAEATTQGLALV

SEQ ID NO: 4865 - protein, 408 aa, unidentified
MLLCTKIRVDVSEQDAAALEFMQGKCRALYNWWIGRLKDGEKWPGWKIAKASLQESKQHDPELCQVYGKLLHEVYFRLDAAMQAFFRRVKQGEKPGFPRVRPRHNFFTLCYPAMYLKIEGDTFILPTGGRGKNKQYPNIKAHLTEDPPTHFKEVAISRDAAGRYYASFVAEREEETNNNNRVVAFDLGIKTLATGANEQGRIYHIGGFKGSQYYNKQLDKIRSKRDKCKKKSRRYIYLSKVYQRVSQKKRNKQRDSLHKASHLIAHKLVERTVVIGDLSQRQMVAKQHQERKKYLNRSVYNDWGLYTFTQMLVYKCQLYGKELVLENERNTSKMCSGCGNLQAMPLWKRTYCCVECGLVMDRDENSAVNILARFITRRGSHTPSVECGVLHADQNSVEVVEASCPTQV

SEQ ID NO: 4866 - protein, 406 aa, unidentified
MVKLGRTLKLRLYPDTFQADEFLAMAQEYQRLANIVSQWVFDHDFPLSWLKINNHLYKKLRQASALNSQMVQSVFRTVVARYKTVQKQMRQHAYRYKTADNKWIQVSRDLTWLEKPIHFRRPQADLVRQSNYSFINGMTQISITTLGKRTKLAFTNKGFEKYFQNDWKLGTAKLVHNQGKWFLHIGITKDVADFDRENNPRIVGIDRGLRFLATAYDHLGKTIFFDGHKILLRRKKFLENRRHLQSKGTKSAKKKLRQLAQRENRWMTDVNHRLAKTLVAAYGPNTLFVLEDLTNVTFNTDDLPKSLRNSHRSWAFFQLESFLTYKAQANQSTVVKVNPAFTSQRCPKCGLIAKANRHHDTHEYWCAECQYRCNDDRLGAMNIELLGQDWLSGVKRPKIQKLTTIG

SEQ ID NO: 4867 - protein, 406 aa, unidentified
MVKLGRTIKLRLYPDTNQAEQFLAMSQEYQRLANIISQWIFDNGFQLSWLKINHQLYKIFRQESELNSQMIQSVFRTVSARYKTVREQMRQHSYRYKNEEHKWIRAPRDLTWLVKPIQFRRPQADLVRQSNYSFVDKMQQISITTLGKRTKLGFTNKGFEKYFTDDWKLGTAKLVHNRDKRFLHIGITKEVSDFDVKANPKIVGIDRGLRFLATTFDSEGKTLFFDGQKILRKRKKFLEIRCRLQSKGTKSAKKKLRQLAQRENRWMTDVNHRLAKTLVALYGPHTLFVLEDLTNVTFNTDDLPKSLRNSHRSWSFFQLESFLMYKAQAIQSTVVKVSPAFTSQRCPKCGLIEKINRHHDTHEYWCKQCQYRCNDDRLGAMNIEMLGQYWLNGVKRPKIKKLTTAG

SEQ ID NO: 4868 - protein, 406 aa, unidentified
MVKLGRTIKLRLYPDTDQAEQFLAMSKEYQRLANIVSQWIFDHEFQLSWLKINHHLYKTFRQESELNSQMIQSVFRTVSARYKTVQEQMRQHPYRYKNEENRWIQVPRDLTWLVKPIHFRRPQADLVRQSNYSFADGLRRVSITTLGKRTKLNFTDKGFEKYFIDDWKLGTAKLVRNRGKWFLHIGITKEVSDFDTKDNPQIVGIDRGLRFLATAFDSKGKTLFFNGQKILRRRKKFLEIRRQLQSKGTKSAKRKLKRLAQRENRWMSDVNHRIAKTLVVLYGSHTVFVLEDLTNVTFNTDDLPKSLRNSHRSWSFFQLELFLTYKAQAIQSVVVKVNPAFTSQRCPKCGLVEKANRHHDTHQYWCTQCQYRCNDDRLGAMNIKILGQDWLSGVKHPKIKKLTTAG

SEQ ID NO: 4869 - protein, 406 aa, unidentified
MVKLGRTIKLRLYPDTNQADKFLAMSQEYQRLANIVSQWIFDHEFQLSWLKINHQLYKIFRQESPLNSQMVQSVFRTVVARYKTVQEQMKQHPYRYQNEEKKWVQVPRDLNWLVQPIQFRRPQADLVRQSNYSFVDKMQQISITTLGKRTKLGFTEKGFEKYFTEDWKLGTAKLVHTQGKWFLHIGITKETSDFNSKENPQIVGVDRGLRFLATAFDSEGKTLFFDGQKILLKRKKFLEIRRQLQSKGTKSAKKKLKRLAQRENCWMTDVNHRLAKTLVSRYGSHTLFVLEDLTNVTFNIDDLPKSLRNSHRSWAFFQLESFLTYKAQAIQSTVVKVSPAFTSQRCPKCGLVEKTNRHHETHEYWCSQCQYRCNDDRLGAMNIEMLGRDWLSGVKHPKIKKLTTAG

SEQ ID NO: 4870 - protein, 406 aa, unidentified
MVKLGRTIKLRLYPDTNQAEQFLAMSQEYQRLANIVSQWIFDHGFPLSWLKINHHLYKIFRQESPLNSQMVQSVFRTVVARYKTVQEQMKQHPYCYKNEEHKWVQAPRDLNWLVTPIQFRRPQADLVRQSNYSFVDKMQQISITTLGKRTKLGFTDKGFEKYFTEDWKLGTAKLVHNRGKWFLHIGITKEVSDFDAKDNPNVVGIDRGLRFLATAFDDEGKTLFFDGQQILRKRRKFLEIRRQLQSKGTKSAKKKLKRLAQRENRWMTDVNHWLAKTLVAVYGSHTLFVLEDLTNVTFNTDDLPKSLRNSHRSWAFFQLESFLTYKAQAIQSAVVKVNPAFTSQRCPKCGLVEKTNRHHETHEYWCAQCQYRCNDDRLGAMNIEMLGQDWLNGIKHPKIKKLTTAG

SEQ ID NO: 4871 - protein, 406 aa, unidentified
MVKLGRTIKLRLYPDTNQAEQFLAMSQEYQQLANIVSQWIFDHEFQLSWLKINHHLYKIFRQESPLNSQMVQSVFRTVVARYKTVQEQMKQHPYRYQNEEKKWVQVPRDLNWLVQPIQFRRPQADLVRQSNYSFVDKMRQISITTLGKRTKLKFTSKGFEKYFADNWKLGTAKLVHNRGKWFLHIGITKEVSDFNTKDNPKIVGIDRGLRFLATAFDSEGKTLFFDGQKILRKRKKFLEIRRQLQSKGTRSAKKKLKRLAQRENRWMTDVNHWLAKTLVAAYGSHTLFVLEDLTNVTFNTNDLPKSLRNSHRSWAFFQLESFLMYKAQAIQSTVLKVSPAFTSQRCPKCGLVEKTNRHHDTHEYWCAQCQYRCNDDRLGAMNIEMLGQEWLNGVKRPKIKKLTTVG

SEQ ID NO: 4872 - protein, 406 aa, unidentified
MVELGRTIKLRLYPNTNQADQFLAMSQEYQRVANVVSQWIFDHEFQLSWLKINHYLYKIFRQESPLNSQMVQSVFRTVVARYKTVREQMKQHPYRYQNEEKEWVQVPRDLNWLVNPIQFRRPQADLVRQSNYSFVDKMQQISITTLGKRTKLGFTDKGFEKYFTDDWKLGTAKLVHTQGKWFLHIGITKEVSDFNPKDSPQIVGIDRGLRFLATIFDSEGKVLFFDGQKILLKRKKFLEIRRQLQSKGTKSAKKKLKRLAQRENRWMTDVNHQLAKTLVARYGSHTLFVLEDLTNVTFNTDDLPRSLRNSHRSWSFFQLESFLTYKAQAIQSTVVKVNPAFTSQRCPKCGLVEKTNRHHETHEYWCSQCQYRCNDDRLGAMNIEMLGQEWLSGVKHPKIKKLRTVG

SEQ ID NO: 4873 - protein, 406 aa, unidentified
MVKLGRTIKLRLYPDTNQAEQFLAISQEYQRLANIVSQWIFDHEFQLSWLKINHHLYKIFRQESPLNSQMVQSVFRTVVARYKTVQEQMKQHPYRYKNEEKKWVQVPRDLNWLVQPIQFRRPQADLVRQSNYSFVDGMRQISITTLGKRTKLRFTDKGFEKYFTDDWKLGTAKLVHNRGKWFLHIGITTEVSDFDAKDNPKVVGIDRGLRFLATTFDNEGKTLFFDGQKILLKRKKFLEIRRKLQSKGTKSAKKKLKRLAQRENRWMTDVNHRLAKTLVSRYGSHTLFVLEDLTNVTFNTDDLPKPLRKSHRSWSFFQLESFLTYKAQAIQGADVKVNPAFTSQRCPKCGLVEKTNRHHETHEYWCSQCQYRCNDDRLGAMNIEMLGRDWLNGVKRPKIKKLTAIG

SEQ ID NO: 4874 - protein, 422 aa, unidentified
MLETTRTYRAKIVNHQQVSDDLDDCGHSASKLWNVARYHIQEEWDDIGEIPSEADLKRELKDHERYSDLHSQSSQRVLEELAESFNGWFKKRKNSDTDANPPGYRKRGDNHPRSTVTWKQNGIKHDPKHNQLRLSKGFNLKNHRSDFILAEYETRPDVAVENIQQVRAVWNGDRWELHLVCKVEIPVDDAPGDNTAGIDLGIKNYLTIAYDNGDAELYPGNVLKQDKHYFTRDEYDTEGENGPSHRALRARQKLSRRKDHFLHSLAKHIVKQCIGHEVGRIAIGDLSEIREDENGESRNWGRSGNKKLHGWEFDRFTTLLEYKAEEHGILVDRKSERDTSKTCSCCGRKRDANRVERGLYVCESCGATMNADVNGAVNIRRKITQNPPSVDMSNGRLARPAVRLFNQTSGRFAPSEQAGCEP

SEQ ID NO: 4875 - protein, 424 aa, unidentified
MSRTIRTFEATITNQQQVRDYLDQLGWAASKLWNVGRYYAQEQWDETGEIPDDGELKAELKGHERYTDLHSQSSQRVLEELAEAFNGWFGKRQNGDDRARPPGYRKSGDSHPRSTVSFKSAGFKHDAQFNRVRLSKGRNLKEHRSDFILCEYQTRPDVDLTEWDIQQVRAVHKRDKWRLQFVCRTTIDPEPPGDGVAGVDLGICNFAAVSFGGESVLYPGGALKEDEYYFTKKKAKCDDSSSLEATRLDRKWTGRRTHFLHSLSKAIVEQCVERGVGTLVVGDLGGIREDDESGESRNWGDHGNLDLHGWAFDRFTTLLDYKAEAEGIDVELESERDTSKSCSACGHTDKNQRVERGLYVCEECDTVANADVNGAENIRQKVLPSLATDGGDRDNGWLAQPAVHLFDRSEGIFAPREQVANREP

SEQ ID NO: 4876 - protein, 463 aa, unidentified
MYPYFQQMTQNAKNLYNTTNFYIRQVFTSFTQEKELQPLQQEVVRTIQQNLQPMNDIQIVAYQKKLKIQQKKPKEKQKEVKLNEFVAPTKDNPYVDYNFLDALFKRIGQPDYRSLPTQSSQGVMKVVFQNWKSFYASLADYKLNPTKYKGRPKIPKYCRSEEKEILFTNQDCVIKNNKHLKFPKTKERLNIGKLALSEGKLKQVRVVPKYHEYMVELVMEVQSEQEILVDNGRYMSIDLGIDNLATIVTNTGRNPVLIKGQKIKSINQYYNKRKAHYLGILRHGKQPSEGIFTSKRLEKLHQTRSFKIKDIFHKASYRIVKIALNENINTIIIGQNKEWKQQIHIGKRNNQSFVHIPHSLLISMIEYKAARNGIKVIVTEESYTSKASFLDDNVPTYGECSNKIRFSGKRIQRGLYRTERGLLINADVNGAANILKKVLVKLKDKQEFKVETVQIWEPQKMII

SEQ ID NO: 4877 - protein, 465 aa, unidentified
MYRTHQVWIKPGHRLFSYLDQVCQDAKILYNTTNFYIRQIVTAFGKNEPLQPLQQQVLETLASHIDLMNERRSERNRSLPFKLPSQESPFIHYNFLDALFKVMNQVNYRALPTQSSQGIMKVVFHNWNAFFASIKDYRQHPEKYNGKPNIPGYARNRVKEAIFSNQDCVIKERKFLKFSKSKLQLNIGKLGYTDGQLKQVRVVPSHGQYVVELIFAYPIEQKKKVQEHVLAIDLGVNNLATIVTTTEAKPIVVKGKIVKAINQYYNKMKAYYTGILRQGKKPREGAHTSRRLERLHLKRHRRIKDLFHKVSHYIVTLAVEHNIGTIVIGHNDGWKQTPGIGRRNNQSFSYIPHQMLIGMIEYKAREQGIVVILTEEAYTSKASFLDQDPLPSYGKEGTWTFSGKRMYRGLYKNTKGLIHADVNGAANIMRKVFPNVSAKGANGVEGLDGNHTINVSTPLVLSILK

SEQ ID NO: 4878 - protein, 485 aa, unidentified
MEHTPYKTYQIWIKKGHRLFSYFQMMCEHAKNLYNTSNFYYRQVYTALTSNKPLHPLQEEVLQVIHTHIGRMNDIQLQAYQKRVAKEQMKPVDERKEVKANLFTKPTNEHPYINYAFLDCLFKVSKQSDYLSLPIQSSQHVMKTMFQNWKSFFASLSDYRKNPHKYKGKPRIPNYSSSKVKEVFFTNQDCVIKNDRYLKFPKTKEQLNIGKMARIKGKLKQVRVLPKYGQFVVEVVWECSLPEPTEKEPTHFMGIDLGIDNLATVVANTGMKPVLIKGKRIKSMNQYYNKQKAYYTSILCHGKSSNQGQHTSKKLERLHLNRHKQIKDLFHKASRHIVNLALQEQVDIIVIGQNKQWKQESNIGKRNNQQFCFIPHRLLIQMIEYKAIEHGIQVVITEESYTSKASFLDLDFLPTYEKEKTYSFSGKRIKRGLYKSAKGILMNADVNGAYNMIRKVVPNAFANGIEGLNGSQSVNVSTPLVLSVQ

SEQ ID NO: 4879 - protein, 489 aa, unidentified
MAKENPSNYKTLQIWIKKGHRMYSYFQECCHNAKNMYNTTNFYIRQVYTGLTQEKELQPLQKEVLANIHKNIGKMNDTQLLAYQKKLEKEKLKPKEEQKEITCNLFSEPNFEKPYVDYNFLDALFKAMIQNDYRALPTQCSQSIMKGVFQNWKSFFASLKDYKKNPNKYAGPPRIPKYIRSSEKEILYTNQDCIIKNDRFLKFPKTKLKLNIGKLGFTEGKLKQVRVIPKYNEYVVELVIDVPYEQQMIEENARYMSIDLGIDNLATIVTNTGMKPVLVKGKHVKSINQYYNKMKSHFTSILRNGKQTNEGPFTSKRIEKLHQKRYLKIKDVFHKVSHHIVKLAQEEEVCKIVIGQNKGWKQETNMGKRNNQSFCHIPHNLLIQMITYKANAVGIQVVVTEESYTSKASFLDNDFIPTYGENDQNTTFSGKRIKRGIYRSANKTLIHADVNAAANILRKVIPNAWTNGIEGLGVKQLANVLTPLTLIVR

SEQ ID NO: 4880 - protein, 490 aa, unidentified
MPRRRGVGAGPVVHRTARIGLRLTRAQRQRCFGLLRSAGDVWACVLEINAWRRRRGDQPAASYQELCRLLSASGPGTFGELDSSGARSVLRRYCDAWFSAAARRKAGHAEVRFPRRRRALMPIRWYHGTFTITGRQLRLPAARGCLPLHVRLDRLVPYPAGTVRSVTLLFDAGRLGIDVTAELPVTTYPHHARPDPDRVAGVDLGIIHPYAAAGLDDGTALLVSGRALRAEHRLHLADTKGRRRATAARAPKPGQRGSRRWRKTRRRARLAETRHRRRTRQALHEATTTLIGWAVDKRIGTLTVGDPRGVLNQNAGRRHNLRLRQWQIGRTLQILQDKAALAGIRVHLVDERGTSSTCPACGKKISKPRGRVMTCQHCQFAGHRDVAAAFTIATRTPGGATTTPAQPCSGVVTHRRAGTHLPGRGSARRDPRRRPPRSAAEGSLGRRRPAPPPVTGRRSPPVVGSRSPTPVDEDPQHDRSQPGQRWWTPH

SEQ ID NO: 4881 - protein, 487 aa, unidentified
MTMEHTPYKTYQIWIKKGHRLFSYFQMMCEHAKNLYNTSNFYYRQVYTALTSNKPLHPLQEEVLQVIHTHIGRMNDIQLQAYQKRVAKEQMKPVDERKEVKANLFTKPTNEHPYINYAFLDCLFKVSKQSDYLSLPIQSSQHVMKTMFQNWKSFFASLSDYRKNPHKYKGKPRIPNYSSSKVKEVFFTNQDCVIKNDRYLKFPKTKEQLNIGKMARIKGKLKQVRVLPKYGQFVVEVVWECSLPEPTEKEPTHFMGIDLGIDNLATVVANTGMKPVLIKGKRIKSMNQYYNKQKAYYTSILCHGKSSNQGQHTSKKLERLHLNRHKQIKDLFHKASRHIVNLALQEQVDIIVIGQNKQWKQESNIGKRNNQQFCFIPHRLLIQMIEYKAIEHGIQVVITEESYTSKASFLDLDFLPTYEKEKTYSFSGKRIKRGLYKSAKGILMNADVNGAYNMIRKVVPNAFANGIEGLNGSQSVNVSTPLVLSVQ

SEQ ID NO: 4882 - protein, 417 aa, unidentified
MANQVTRTHVASIRNHQQVCDDLDSLGFAASKLWNVARWTCDRIWDETGTIPNDGVLKAYLKNHERYADLNAQSSQAILEELVEAFDSWYTLRGNGDENANPPGYRKHGDEHPRSTVTFKEDGFKHDSDHNQIRLSKGRNLKDGRQDFILCEYDADPDVAIKNVQQVRTVWTDTEWELHIVCNVEIDDPDPPGDRVAGIDLGICNFAAVAVGDDALLYPGGALKEDEYYFQKERAKCDDSDSQKARRLDRKRDERRTHFFHAVSKDIVAECAARNVGKIAVGDLTGIREDADWGDHGNLDLHGWAFDRFTEMLEYKAAEHGISVERVDERDTSTSCASCGTTEGSHRVERGLYVCEECGLVANAEVNGAENIRQKVLPTLACDGGDRDNGWMAQPAVRLFDKSTGRVAPQEQVRRKS

SEQ ID NO: 4883 - protein, 422 aa, unidentified
MLETTRTYRAKIVNHQQVSDDLDDCGRSASKLWNVARYHAQQEWEETGEIPSEADLKRELKDHERYSDLHSQSSQRVLEELAEAFNGWFKKRKNGDTDANPPGYRKRGDNHPRSTVTWKQNGIKHDAKHNQLRLSKGFNLKTHRSDFILAEYETRPDVTVENIQQVRAVWNGDRWELHLVCKVEIPVEDAPGNKTAGIDLGIKNYLAIAYEDGDAELYPGNVLKQDKHYFTRDEYDTEGENGPSRRALRARQKLSRRKDHFLHALAKHIVERCIDHEVGRIAIGDLSQIREDENGDSRNWGKRGNKKLHGWEFDRFTTLLEYKAEEHGILVDRKSERETSKTCSCCGRKRDANRVERGLYVCESCGTTMNADVNGAVNIRRKITQNPPTRDMSNGRLARPVAYLFNQTSGRFAPSEQVGCEP

SEQ ID NO: 4884 - protein, 414 aa, unidentified
MIRTHIEPCHVNRAEADALNRASGERYTQVAVFHWRTYRKHGHWLSQYGAEKWNDRANAEQPTLLHAHSVDAAQQGFYKACKTTRACRKAGLETRFPYRRKKFRTTIWKQTGIRREGDTLLLARARGQPSIRITLPEHLRDVLDIREVRLVYDKAKRRHFWHIVVEHGTQPKEAPGTTTVAVDLGEVHPAAVSDGHDTVVVTCRALRSQRQYAAKRLAELRQRQSTCKRGSRMWKRLQRRINRFLYQQAKRTRDMEHKVSREVVNTAVAMEAGTIAIGDVRDAAEKVKLGKKSNQKISNWSHGKVRQYITYKAAAEGIQTELVDERYTSQTCPSCGCRHKPRGRVYTCGQCGFSGHRDGVGAVNILSVQQHGEPGRICPTGSTTYRIPYNVRVLRSPLDTGQVACGQPQEAAAL

SEQ ID NO: 4885 - protein, 462 aa, unidentified
MHRTARVALRVTPGQRRRCFGLLRSAGDVWACVLEVNAWRRRRHDAPLVGYQQLCRELAASGPGTFAELDCAGARSVLRRFSDAWFAAAKRRSAGDVSARFPRRRRGLVPVRWYHGTFALDGLRVRIPTAKGSAPLWVRLAREVPYPVEQVRSVTLLCEGGRLFLDVTAEVPVAVYPPGEQPDPARVAGVDLGIVHPYAVAGPDGEGLLVSGRAIRAEHRMHLADTKARRRAVARRAPKPGEKGSRRWRKYRRRARLVEGRHRRRVRQAQHEAARGVVSWAVRERVGVLHVGDPRGVLDIAAGRRHNLRLRQWQIGRLLQVLTDKATLAGITVRLVDERGTSSTCPACRRRVPKPRGRTLSCPHCAFSGHRDLVAAAIIATRIPGGGSTTPAAVVLPEVVTHRRAGRHLPGAGRSRRDPRRPAHDRAARGSVGPRRPAPPPGGESLAPKARIHNTHRKPGER

SEQ ID NO: 4886 - protein, 464 aa, unidentified
MHRTACVALRVTPGQRRPRFGLLRSAGDVWPCVLEANAWRRRRHDAPLVAYQQLCRELAASGPGTFAELDTTGARSVLRRFSDAWFAAAKRRSAGDLSARFPRRRRGLVSVRWYHGTFTVDGCRVRIPTARGTSPLWVRLAREVPYPAEQVRSVTLLCEGGRLFLAVTAEVPVTVYPPGEEPDPARVAGVDLGIIHPYAVAGPDGEGLLVSGRAIRAEHRMHLADTKSRRRAVAHRAPKPGQKGSRRWRQYRRRTRLVEGRHRRRVRQAQHEAARTVVSWAVRQRVGVLHVGDPRGVLAIPAGRHNLRLRQWQIGRLLQVLTDKATLAGITVRLVDERGTSSTCPACRGRVPKPRGRTLSCPHCAFSGHRDLVAAASIATRVPGGGSTTPAAVVLPQVVTHRRAGRHLPGAGRSRRDPRRPPLAARGSVGPRWPTPPIGGESLAQQARIRDTYRTPGERQWKPH

SEQ ID NO: 4887 - protein, 460 aa, unidentified
MHRTARVALRVTPGQRRRCFGLLRSAGDVWACVLEVNGWRRRRRDVPLSGYQELCRELATSGPGTFAELDSVGARSVLRRFSDAWFAAAKRRSAGDLLARFPRRRRGLVPVRWYHGTFTLDGRRVRIPTAKGGAPLWVRLAREVPYPAEQVRSITLMCEDGRLFLDVTAEVPIAVYPPGEEPDPARVAGVDLGIIHPYAVAGPDGEGLLVSGRAIRAEHRMHLADTKARRRAVARRAPKPGEKGSRRWRQYRRRARLVEGRHRRRVRQAQHEAARTVVSWAVRQRVGVLHVGDPRGVLNLPAGRRHNLRLRQWQIGRLLQVLTDKATLAGITVRLVDERGTSSTCPACRRRVPKPRGRTLSCPHCAFSGHRDLVAAASIATRTPGGGSTTPTAVVQPEVVTHRRAGRHLPGAGRSRRDPRRPPRAARGSVGPRRPAPPTGGESLAPKARIHNTHRKPGER

SEQ ID NO: 4888 - protein, 459 aa, unidentified
MHRTARVALRVTAGQRRRCFGLLRSAGDVWACVLEVNAWRRRRRDVPLSGYQELCRELATSGPGTFGELDSVGARSVLRRFSDAWFAAAKRRSAGDVSARFPRRRRGLVPVRWYHGTFTLDGLRVRIPTAKGSAPLWVRLAREVPYPVEQVRSVTLLCVGGRLFLDVTAEVPVAVYPPGEQPDPACVAGVDLGIIHPYAVAGPDGEALLVSGRAIRAEHRMHLADTKARRRGVARRAPKPGEKGSRRWRQYRRRARLVEGRHRRRVCQAQHEAARTVVSWAVRQRVGVLHVGDPRGVLDLSAGRRHNLRLRQWQIGRLIQILVDKATLAGISVRLVDERGTSSTCPACRRRVPKPRGRTLSCPHCAFSGHRDLVAAASIATRVPGGGSTTLAAVVLPEVVTHRRAGRHLPGAGRSRRDPRRPPRAARGSVGPRRPAPPGGESLAPKARIHNAHRKPGER

SEQ ID NO: 4889 - protein, 460 aa, unidentified
MHRTARVALRVTPGQRRRCFGLLRSAGDVWTCVLEVNAWRRRRRDVPLSGYQELCREMAASGPGTFAELDTTGARSVLRRFSDAWFAAAKRRKGGDLSARFPRRRRGLVPVRWYHGTFTLDGRRVRIPTAKGGAPLWVRLAREVPYPAEQVRSITLLCEGGRLFLDVTAEVPVAVYPPDEQPDPARVAGVDLGIIHPYAVAGPDGEGLLVSGRAIRAEHRMHLADTKARRRAVAPRAPKPGQKGSRRWRQYRRRARLVEGRHRRRVRQAQHEAAHSVVSWAVRQRVGVLHVGDPRGVLDLPAGRRHNLRLRQWQIGRLLQVLTDKATLAGITVRLVDERGTSSTCPACRRRVPKPRGRTLSCPHCAFSGHRDLVAAASIATRIPGGGPTTPTAVVLPQVVTHRRAGRHLPGAGRSRRDPRRPPGPARGSVGPRRPAPPPGGESLAPKARIHNVHRKPGAR

SEQ ID NO: 4890 - protein, 464 aa, unidentified
MHRTARVALRVTPGQRRRCFGLLRSAGDVWACVLEVNAWRRRRRRDAPLVGYQQLCCELAASGPGTFAELDSVGARSVLRRFSDAWFAAAKRRSAGDVSARFPRRRRGLVPVRWYHGTFTLDGRRVRIPTAKGSAPLWVRLAREVPYPVEQVRSVTLLYEGGRLFLDVTAEVPVAVYPPGEQPDPGRVGGVDLGIVHPYAVAGPDGDGLLVSGRAIRAEHRMHLADTKARRRAVARRAPKPGERGSRRWRQYRRRARLVEGRHGRRVRQAQHEAARSVVSWAVGQRVGVLHVGDPRGVLDLPAGRRHNLRLRQWQIGRLLQVLTDKATLAGISVRLVDERGTSSTCPACRRRVPKPRGRTLSCPHCGFSGHRDLVAAAIIATRIPGGGSTTPAAVVLPEVVTHRRAGRHLPGAGRSRRDPRRPAHDRAARGSVGPRRPAPPPSGGESLAPKARIHNSHRKPGER

SEQ ID NO: 4891 - protein, 474 aa, unidentified
MPRRRDPAAPRVVHRTARVALRVTPGQRRRCFGLLRSAGDVWACVLEVNAWRRRRHDAPLVGYQQLCRELAASGPGTFAELDCAGARSVLRRFSDAWFAAAKRRSAGDVSARFPRRRRGLVPVRWYHGTFALDGLRVRIPTAKGSAPLWVRLAREVPYPVEQVRSVTLLCEGGRLFLDVTAEVPVAVYPPGEQPDPARVAGVDLGIVHPYAVAGPDGEGLLVSGRAIRAEHRMHLADTKARRRAVARRAPKPGEKGSRRWRKYRRRARLVEGRHRRRVRQAQHEAARGVVSWAVRERVGVLHVGDPRGVLDIAAGRRHNLRLRQWQIGRLLQVLTDKATLAGITVRLVDERGTSSTCPACRRRVPKPRGRTLSCPHCAFSGHRDLVAAAIIATRIPGGGSTTPAAVVLPEVVTHRRAGRHLPGAGRSRRDPRRPAHDRAARGSVGPRRPAPPPGGESLAPKARIHNTHRKPGER

SEQ ID NO: 4892 - protein, 407 aa, unidentified
MQRLQAFKFELMPNGEQQRDMRRFAGSCRFVFNKALALQKANHEAGEKFIGYVAMARLLTGWRNGTETPWLKDSPVHPLQHALKDMERAYKNFFAKRAAFPRFKKRGQRDSFRYPDPKQIKLEQGNSRIFLPKLGWLRYRNSRDVLGAVRNATVSLSAGKWFVSIQTEREVEQPMPQATSAIGIDVGVARFATFSDGSYLAPLNSFRRHEARLRRYQHAMSRKTKFSNNWKKAKARVQRIHTRIGNARRDYLHKATHTISQNHAMVCIEDLQVRNMSRSAAGSTDQPGKNVRAKSGLNKSILDQGWFEFRRQLDYKLAWNGGWLIAVPPQNTSRTCSACGCISADNRLTQAKFACVECGFEEHADVVGAINTLARGHRVAACGEAVLSGPSVKQEPTEVTMRGRSHA

SEQ ID NO: 4893 - protein, 489 aa, unidentified
MEKKKDEDKILRTQSIRIKKGHRLYTYCDSMCFLSKNLYNTTNFYIRQIFSGLKKDKVSRQDNEVKVIKEINDVIQTLNDIKIAYVEKRRLKELQKPENQKKKIADAKLFESLTEENSYPSYGLLDGVFKTRNQVDYISLPSHSNQHVIKLVFQDWKSFFEASKDYKKNPDKYKGKPKPPRYAKKNGRKIAFFSNQTCVIQDNKYLKFPKTKEKINLGKLGQIEGSLKQVRIVPGHTYYTIEVVFELQEKRVPLKETPERILGIDLGIDNFATIVNNVGQQPIIIKGKVLKSINQYYNKMRAHYYGILRQGKTEKQGPFTSSRLDKLDSKRRDKVKDFLHKASFNIIQYAVGLNIDTIIIGKNKDFKENVNLRKDIKLNFKGIPYSMFIEILIYKANMKCIKVIITEESYTSKASFLDNDHIPSYKDKKEEKLQFSGKRIKRGMYKTKNDILINADVNGAANIIRKVVPDAFGKGNRGVVSTPLVLSVA

SEQ ID NO: 4894 - protein, 514 aa, unidentified
MKVSTEHLFLNGEVNEMYSAYKIQIHPDHELFHYCDSLCFKAKNLYNITNYYIRQVYTALNKETQNENQLQVLRDIELHLRKMNEIRQKSYEIAKMKPKKVDKSGKSIDAKLKLFEMPHHGKSFIGYGFVEALFKVMKQVDYTSMPSQSNQQTMKKVYDDWKSFFEASKKYKINPASFSGKPKIPKYKQKNGRTTCYLTNQIATIKEGNVLKLPGTHLQLNLGKVARSEGKLQQVRIVPSYGRYVVEVIFKGTQDKEIHRTEKQFNELVFEPKRVMGIDMGVNNLATIVDNTGLKPLLIKGTRLKSFNQYYNKLKGYYMSIIRNGKGPKEGIFNTKRMTSLDRKRNNRVMDFLHKASAKVVEIALDRNIDTIIIGRNVGWKLEVDMQKANKQTFIQIPYSTFIEMIRYKAERKGIQVIDREESYTSKSSFLNHDPIPTFGEEHQTIFSGYRSTRAFYKVKGSKVLIHADVNGAFNIVRKHVKSAFEGLERKQFLQSPQKIIIIKSTHAKLKASA

SEQ ID NO: 4895 - protein, 481 aa, unidentified
MPRRRDVGTGPVVHRTARVGLRLTRHQQHRCFGLLRSAGDVWACVLEVNAWHRRRGDKPVAGYQELCRLLAASGPGIFGELDTTGARSVLRRYSDAWFSAAARRKAGHAEVRYPRRRRGLMPIRWYHGTFTLTGRRLRLPVARGGDPLWVRLDRLVPYPPETVRSVTLLVDAGRLWIDVTAELPITTYPPGTGPDPARVAGVDLGIIHPYGAAHPADGSALLVSGRAIRAEHRLHLTDTRHRRRATATHTPAKGRRGSRRWRKIRRRARLVEGRHRRRTRQALHEATKMLIGWAVSKRIGTLTVGDPRGVLDISAGRRHNLRLRQWQIGRTLAMLQDKAALAGIRVHLVDERGTSSTCPACHQKISKPRGRRMVCPHCAFTGHRDIAAAFTIATRTPGGATTPHPPACTGVVTHRRAGRHLPGARPARRDPRRRPLAASGSLGRRRPAPPPPVMGSRSFTIVTEDPQPHRTQTGQRSWTPH

SEQ ID NO: 4896 - protein, 424 aa, unidentified
MANKVATRTFRARILNHSQVRDDLDSLGFAASKLWNVGRWTAQRVWDACGQIPGANALTAYLKKHERYADLHSQSSQRVLQELGEAFTSWVGKRENGDTKANPPGYRKRNGDHPRSTVTFKQAGFKHDAANNRLRLSKGKNLKDGWSDFVLCEYEVIGPPETAIENVQQVRAVYEHGEWRLHVVCQVEIDSPDAPGDDVAGIDLGICNVAAVSFGDESLLYPGGALKENEYYFAKKKAKCDDSSSREATRLDRKRTGRRTHFLHTLSKAIVEECIERGVEMIVVGDLASIREDDENGEPRNWGDHGNLDLHGWAFDRFTSMLTYKAEERGIEVELVSERDTSKSCSACGRSADSQRVERGLYVCEECGLVANADSNGAENIRQKVLPNPQQDRDNGWLAQPAVRLFDRSEGRFAPREQVMNREP

SEQ ID NO: 4897 - protein, 417 aa, unidentified
MANQVTRTYVASIRNHQQVRADLDSLGFAASKLWNVARWTCDRVWDETSTIPDDSTLKAYLKNHERYADLNAQSSQAILEELTEAFDSWYAHRENGTENANPPGYRKHGDDHPRSTVTFKEDGFKHDADHDQIRLSKGRNLKDGRSDFILCEYAANPDVDVQNVQQVRAVWTDDEWELHIVCGVEIENTDASGDRVAGIDLGICNFAAVAVGDEALLYSGGALKEDDYYFQKERAKCDDSDSRKARQLDRKRDQRRTHFLHAVSADIVAECAARNVSTIAVGDLSGIREGADWGDHGNLDLHGWAFDRFTEMLEYKAAERGISVERVDERDTSKSCAACGTTDDSQRVERGLYVCEECGLVANADVNGAENIRQKVLPSLACDGGDRDNGWMAQPAVRLFDTSTGRVAPQGQVRREP

SEQ ID NO: 4898 - protein, 422 aa, unidentified
MLETTRTYRAKIVNHQQVSDDLDDCGHSASKLWNVARSHIQQEWDDTGEIPSEADLKRELKDHERYSDLHSQSSQRVLEELAESLNGWFEKRKNGDTDANPPGYRKQGDNHPRSTVTWKQNGIKHDSKHNQLRLSKGFNLKNHRSDFILAEYETRPDVTVENIQQVRAVWNGDYWEFHLVCKVEIPVEDAPGDNTAGIDLGISNYLAIAYDDGDAELYPGNVLKQDKHYFTRDEYDTEGNNGPSRRALRARQTLSRRKDHFLHALAKHTVEQCIDHEVGRIAVGDLSKIREDENGDARNWGKRGNKKLHGWEFDRFTTLLEYKAEEHGILVDRTSERDTSKACSCCGRKQDANRVERGLYVCESCGVTINADVNGAVNIRRKITQNPPTGDTSNGRLARPVAYLFNQTSGRFAPSEQVGCES

SEQ ID NO: 4899 - protein, 402 aa, unidentified
MKRLQAFKFQLRPGGQQEREMRRFAGACRFVFNRALALQNENHEAGNKYIPYGKMASWLVEWKNATETQWLKDAPSQPLQQSLKDLERAYKNFFRKRAAFPRFKKRGQNDAFRYPQGVKLDQENSRIFLPKLGWMRYRNSRQVTGVVKNVTVSQSCGKWYISIQTENEVSTPVHPSALMVGLDAGVAKLATLSDGTVFGPVNSFQKNQKTLARLQRQLSRKVKFSNNWQKQKRKIQRLHSCIANIRRDYLHKVTTTVSKNHAMIVIEDLKVSNMSKSAAGTVSQPGRNVRAKSGLNRSILDHGWYEMRRQLEYKQLWRGGQVLAVPPAYTSQRCACCGHTAKENRLSQSKFRCQACGYTANADVNGARNILAAGHAVLACGEMVQSGRPLKQEPTEMIQATA

SEQ ID NO: 4900 - protein, 422 aa, unidentified
MLETTRTYRAKIVNHSQVSDDLDDCGHSASKLWNVARYHTQQEWDETGEIPSEADLKRELKDHERYSDLHSQSSQRVLEELAESFNGWFKKRKNGDTDANPPGYRKRGDDHPRSTVTWKQNGIKHDDKHNQLRLSKGFNLKNHRSDFILVEYETRPDVTVENIQQVRAVWNGDRWELHLVCKVEIPVEDAPGDNTAGIDLGIKNYLAIAYDDGDAELYPGNALKQDKHHFTHDEYKTEGENGPSKRALRARQKLSRRKDHFLHALAKHIVELCIDHEVGRIAIGDLSKIREDENGDSRNWGKRGNKKLHGWEFDRFTTLLEYKAEEHGILVDRKSERDTSKTCSCCGRKRDANRVERGLYVCESCGATMNADVNGAVNIRRKITQNPPTGDMSNGRLARPVTYLFNQTSGRFAPSEQVGCEP

SEQ ID NO: 4901 - protein, 422 aa, unidentified
MLETTRTYRAKIVNHQQVRGDLDDCGHSASKLWNVARYHSQQEWDGTGEIPSEADLKRELKDHERYSDLHSQSSQRVLEELAEAFNGWFKKRKNGDTDANPPGYRKRGDNHPRSTVTWKQNGIKHDSKHNQLRLSKGFNLKSHRSDFILAEYETRPDVTVEHIQQVRAVWNGDRWELHLVCKVEIPVEDAPGDNTAGIDLGISNYLAIAYDDGDAELYPGNVLKQDKHYFTHDEYDTEGENGPSRRALRARQKLSRRKDHFLHALSKHIVERCIDHEVGRLAIGDLSKIREDENGESRNWGKRGNKKLHGWEFDRFTTLLEYKAEEHGILVDRKSERDTSKTCSCCGRKCDANRVERGLYVCESCGATMNADVNGAVNIRRKITQNPPTGDMSTGRLARPVAYLFNQTSGRFVPSEQVGCEP

SEQ ID NO: 4902 - protein, 415 aa, unidentified
MLLCKKIKLNVTKQDAATLEFMQGKCRGLYNWWVLQLKNGEKWPGWRIAKKTLQASKRHDPELQQVYGKLLHEVYFRLGAAMDAFFRRVNNGEKPGFPRVRPRHCFFTLIYPAMYIQIEGKTLILPTGGKGAKNKRYPNVEAKLTEIPPEGFREVAISRDGRGDYYASFSYRVKEHDQQPGAVVAFDLGIKTLATGVNEQDRFYAIGGFKGSQWYNKQLDKIRSKREKCQKKSRRYIHLSKVYKRVAQKKRTKQRDSLHKASHLIAHKLVERTVVIGDLSQRQMVMKEHAERNKHRNRAVYNDWGLYTFTEMLKYKCLLYGKELVFLDERNTSKACSGCGHLQAMPLWKRTYCCTNCELVMDRDKNSAVNILTRFLARRGPYTSFGECDVLHAVQNSVEVMEASCPNQVQQRELW

SEQ ID NO: 4903 - protein, 434 aa, unidentified
MKRTVTLKLQPSKEQAKILSELADIGAKVWNRVNFLRRQQFFQDRIVDFNKTEKTVYEEFKQEIGSATVQQIARKNAEAWRSFFSLLRKKRNGELSNWLKPKPPNYLKEDGKRKPLIVLRNDQYKSEGNKLILKGLGKFKRLEIQFKGRIHLKSKQGRLEITYDNVKKRWYAHVSLTVEEKLEGGEWIELPRTPKGNLSAGIDLGINNLMAVYVENGESFLVNGKPLKSIDFYWRRKIADYQSKLNRSGAKTSRKLKRMHERAKLQAKHYINTAVRQMVRRLYDLGVSRIIVGYPKGIARSSDKGKKQNFLLSHVWRFNTVIKRLTEVAEEYGIQVLVVNEAFTSKLCPVCGKPHEGARFVRGLYLCPATGLIFNADLVGAFNILKKVVETITPNLSGLYAQRRGNWPKTGPEGSKTRFILGLNETPQTSPLIG

SEQ ID NO: 4904 - protein, 436 aa, unidentified
MKRTVTLKLQPSKEQAKILSELAGLGAKVWNRVNYLRRQQFFKEQIVDFNSTEKTVYEEFKQEIGSATVQQICRKNAEAWRSFFSLLRKKRNGELPSWMKPKPPNYLKEDGKRRPLIVLRNDQYKIEGNTLILKGLGKFKRLEIRFKGRIHLKGKQGRLEITYDDVKRKWYAHISFTVEEKLEGGEWVSVPRQPKGNLSAGIDLGVNNLMAVYVKNGESFLVNGRPLKSIDFYWRRRIAEYQSKLNKSGAKTSRKLERMHDKAKLQAKHYINTAVRQTVKKLYDLGVSRIVVGYPKGIARSSDKGKKQNFLLSHVWRFNYVIKRLTEVAGEYGIRVVVVNEAFTSKTCPVCGKPHEGARFVRGLFKCPATGLIFNADLVGAFNILKKAVKTITPNLGGLYAQERGNWPKTGPEGLKTRFLVGLSETPQTSPPMARG

SEQ ID NO: 4905 - protein, 418 aa, unidentified
MLSKLADAGAKVWNRVNFLRRQQYFKEQIVDFNSTEKTVYEEFKREIGSATVQQIARKNAEAWRSYFSLLRKKRNGELPNWLKPQPPNYLKEDGRRKPLIVLRNDQYKIEGNKLILKGLGKFKRLEVQFKGRIHLKGKQGRLEVTYDPVKRKWYAHLSLIVEEKLEGGEWVKLPRTPKGDLSAGIDLGVNNLMAVYVENGESFLVNGRPLKSIDFYWRRRIADYQSKLNKSGCKKSRKLRRMHEKAKLQAKHYINTAVRQTVKKLYELGVSKIVVGYPKGIARNSDKDKRQNFIISHVWRFNTVIKRLTEVAEEYGIRVLVVNEAFTSKLCPVCGKPHERARFVRGLFKCPVTGLIFNADLVGAFNILKKVVGTITPSLGGLYAQGRGNWGKTVPEGFEEPSLRVALMRTPQTSLPVG

SEQ ID NO: 4906 - protein, 437 aa, unidentified
MKRTVTVKLQPSKEQEKVLSELADLGAKVWNRVNYLRKQQFFEGKIVDFNTTEKTIYEEFKREIGSATVQQICRKNAEAWRSFFSLLRKKRNGELPDRLKPKPPNYLKEDGRRKPLIVLRNDQYKIDENKLILKGLGKFKRLEIQFKGRIHLKGKMGRLEITYDDVKRKWYAHVSFTVGEKLENGEWVKLPRKPEGSLSAGIDLGVNNLMAVYVENGESFLVNGRPLKSIDFYWRKKIAGYQSKLNKSGAKTSRKLKRMHDKAKLQARHYINTAVRQTVRKLYDLGVSRIVVGYPKGIAQSPGKGKKQNFLISHVWRFNYVIKRLTEVAEEYGIKVVLVDEAFTSKTCPVCGKPHEGVRFVRGLYSCPATGLIFNADLVGAFNILKKIVKTITPNLSGLYAQRRGNWGETLPEGFEEPFSKVALMRTPQTSLPLARG

SEQ ID NO: 4907 - protein, 436 aa, unidentified
MKRTITVKLQPSKEQAKILFELADTGAKVWNRVNFLRRQQYFKEQIVDFNTTEKTVYEEFKREIGSATVQQIARKNAEAWRSFFSLLRKKRNGELSSWLKPKPPNYLKEEERRKPLIVLRNDQYKIEGNKLILKGLGKFKRLEIQFKGRIHLKGKQGRLEITYDPVKRKWYAHVSFTVEEKLENNEWVSVPRTPKGNLSAGIDLGVNNLMAVYVENGEGFLVNGRPLKSIDFYWRGRIAEYQSKLNKSGAETSRKLKRMHEKAKLQAKHYINTVVRQTVRRLYELGVSRIVVGYPKGIARNSDKGKKQNFLLSHVWRFNTVIKRLTEVAEEYGIRVLVVGEALTSKTCPVCGKPHEGARFVRGLFKCPATGLVFNADLVGAFNILRKVVETITPNLGGLYAQGRGNWPKTGPEGLKTHFLVGLNETPQTSPSMARG

SEQ ID NO: 4908 - protein, 489 aa, unidentified
MTKENPSNYKTLQIWIKKGHRMYSYFQECCHNAKNMYNTTNFYIRQVYTGLTQEKELQPLQKEVLDHIHKNIGKMNDTQLLAYQKKLEKKKLKPTEEQKEITCNLFSEPNFEKPYVDYNFLDALFKLMIQNDYRALPTQCSQSIMKGLFQNWKSFFASLKDYKKNPNKYAGMPRIPKYIRSSEKEILYTNQDCIIKNGRFLKFPKTKLQLNIGKLGFTEGKLKQVRVIPKYNEYVVELVMDVPSEQQIIEENARYMSIDLGIDNLATIVTNTGMKPVLVKGKHVKSINQYYNKMKRHFTSVLRNGKQTNEGPFTSKRIEKLHQKRYLKIKDVFHKVSHHIVKLAQEEEVCKIVIGQNKSWKQETNMGKRNNQLFCHIPHSVLIQMITYKANAVGIQVVVTEESYTSKASFLDNDFIPTYGENDQNTTFSGKRIKRGIYRSANKTLIHADVNAAANILRKVIPNAWTNGIVGLSVKQLANVLTPLTLIVR

SEQ ID NO: 4909 - protein, 402 aa, unidentified
MKRLQAFKFQLRPNGQQERDMRRFAGACRFVFNRALALQNENHEAGNKYISYTKMASWLIEWKSHPDTQWLKDAPSQPLQQSLKDLERGYKNFFQKRAAFPRFKKRGQNDAFRYPQGVKLDQTNNRISLPKLGWIRYRNSREVIGEVKNVTVSQSCCKWYVSIQTEFEVPEPVHKAASMVGLDAGVTKLATLSDGTVYQPVNSFKASQRKLAMLQRQLSRKVKFSASWQKQKKKIQRLHSHIANIRRDYLHKVTSEISKNHAMIVIEDLKVSNMSKSAKGTAERHGRNVRAKSGLNRSILDQGWYEMRRQLEYKQLWRGGQVLAIPPAYTSQRCACCGHTAKENRQTQSKFVCQVCGYTENADINGARNILAAGHAVLACGGMVQSGRPLKQEPTEASQAPV

SEQ ID NO: 4910 - protein, 402 aa, unidentified
MKRLQAFKFQLRPSGQQECEMRRFAGACRFVFNRALALQNENHEAGNKYIPYGKMASWLVEWKNATETQWLKDAPSQPLQQSLKDLERAYKNFFQKRAAFPRFKKRGQNDAFRYPQGVKLDQENSRIFLPKLGWMRYRNSRQVTGVVKNVTVSQSCGKWYISIQTESEVSTPVHPSASMVGLDAGVAKLATLSDGTVFGPVNSFQKNQKTLARLQRQLSRKVKFSNNWQKQKCKIQRLHSRIANIRRDYLHKVTTTVSKNHAMIVIEDLKVSNMSKSAAGTVSQPGRNVRAKSGLNRTILDQGWYEMRRQLEYKQLWSGGQVLAVPPAYTSQRCACCGHTAKENRLSQSKFRCQVCGYTANADVNGARNILAAGHAVLACGEMVQSGRSLKQEPTEIIQATA

SEQ ID NO: 4911 - protein, 460 aa, unidentified
MHRTARVALRVTPGQRRRCFGLLRSAGDVWACVLEVNAWRRRRHDSPLVGYQELCRELAASGPGTFAELDTTGARSVLRRFSDAWFGAAKRRKAGDLSARFPRRRRGLLPVRWYHGTFTLDGRRVRIPTAKGTSQLWVRLARDLPYPVEQVRSITLLSEAGRLFLDVTAEVPITVYPAGEEPDPGRVAGVDLGVIHPYAVAGPDGEGLLVSGRAIRAEHRMHLADTKARRRAVARRAPKPGEKGSRRWRKYRRRARLVEGRHRRRIRQAQHEAARTVISWAVRQRIGVLHVGDPRGVLDLPAGRRHNLRLRQWQIGRLIQVLTDKATLAGITVRLVDERGTSSTCPTCGRRVPKPRGRTLSCPHCHFSGHRDLVAAASIATRTPGGGPTTETAVVLPQVVTHRRAGRHLPGTGRSRRDPRRPPRTARGSVGPRRPAPPPGGESLAHTARIHNRHRTSGER

SEQ ID NO: 4912 - protein, 471 aa, unidentified
MPRRRDSGAPRVVCRTARVGLRLTRAQRQRCFGLLRAAGDLWACVLEYNSWRHRRQDRPVAGYQELCRLLAASGPGTFGELDSTGARSVLRRYSDAWFSAAARRRAGHGEVRYPRRRRSLMPVRWYHGTFGLSERRLRLPTSLGSPPLVVRLDRAVPYPRDAVRSVTLVFDQGRLWVEVTAELPVATYAAGQEPQRGRVAGVDLGIIHPYAVAAGDGQMLLVSGRAIRAEHRQHLADTKGRRRATAARAPKRGQRGSRRWRKTRRRARLMEGRHRRRVRQAGHEAAKTVIDWAVQHRVGTLTVGDPRGVLDLPAGRRHNLRLRQWQLGRAIAVLKDKAELVGITVYLVDERGTSSTCPVCQRRVVKPRGRTMMCRSCGFVGHRDVAAAFTIATRAPGGVTTTAPDMGAVITHRRAGRHLPGAGLSRRDPRRPPAVSGSVGRLRPAPLPVGSRSLRQRLGEEPQHHRQPGER

SEQ ID NO: 4913 - protein, 422 aa, unidentified
MLETTRTYRAKIVNHSQVSDDLDDCGHSASKLWNVARYHAQQEWDETGEIPSEADLKRELKDHERYSDLHSQSSQRVLEELAESFNGWFKKRKNGDTDANPPSYRKRGDNHPRSTVTWKQNGIKHDSKHNQLRLSKGFNLKNHRSDFILCEYETRPDVTVENIQQVRAVWNGDRWELHIVCKVEIPVEDAPGDKTAGIDLGIKNYLAIAYDDGDAELYPGNVLKQDKHYFTRDEYDTEGENGPSRRALRARQKLSRRKDHFLHALAKHIVEQCIDHEVGRIAIGDLSKIREDEDGDSRNWGKRGNKKLHGWEFDRFTRLLEYKAEEHGILVDRKSERDTSKTCSCCGRKRDANRVERGLYVCESCGAAMNADVNGAVNIRRKITQNPPTEDMSNGRLARPVAYLFNQTSGRFAPSEQVGCEP

SEQ ID NO: 4914 - protein, 422 aa, unidentified
MLETTRTYRAKIVNHSQVSDDLDDCGHSASKLWNVARYHIQQEWDATGEIPSEADLKRELKDHERYSDLHSQSSQRVLEELAESFTGWFKKRKNGDTDANPPGYRKRGDNHPRSTVTWKQNGIKHDSKHNQLRLSKGFNLKNHRSDFILAEYETRPDVTVENIQQVRAVWNGDRWELHLVCKVEIPVEDAPGDNTAGIDLGISNYLAIAYDDGDAELYPGNVLKQDKHYFTRDEYDTEGKNGPSRRALRARQKLSRRKDHFLHALAKHIVEQCIDHEVGRIAIGDLSQIREDENGESRNWGKRGNKKLHGWEFDRFTTLLEYKAEEHGILVDRVSERDTSKTCSCCGRKRDANRVERGLYVCESCGTTMNADVNGAVNIRRKITQNPPTEDMGNGRLARPAVHLFNQTSGRFAPSEQASCEP

SEQ ID NO: 4915 - protein, 401 aa, unidentified
MTTLGRTAKLRLYPSEIQAIQLSDESQEYQRLANVVSEWVFNHGFPMNCLKINHALYQKLRQESPLNSQLIQSVFRTVVARYKTVLEQMRQHPFRYQDETKKWIQTPKDLTWLFKPIHFSRPQADLVRQSNYSFVNGLTKISLTTLGKRTKMSFTSKGFEQYFQNGWKMGTAKLIHARGKWYLHIGVTKEVADFESTKAPKVVGIDRGLRFLATIHDHLGKTLFFDGKKILRKRKKFQDTRRQLQSKGTKSAKKKLKQLAQRENRWMTDVNHRLAKTLVSIYGSRTLFVLEDLTNVTFNTDDLSKALRNSHRSWSFFQLESFLSYKAAAVQSKVLNVSPVFTSQRCPQCGLIKKANRHHEVHEYHCCRCQYRSNDDRLGAMNIRLLGEEWLRGVKRPQIKK

SEQ ID NO: 4916 - protein, 406 aa, unidentified
MTILGRTAKVRLYPSEIQAIQLSDESREYQRLSNIVSEWVFNHDFPMNYLKINHALYKKLRQESPLNSQMIQSVFRTVVARYKTVLEQMRQHPFRYQDVDKKWVQTPIDLTWLFKPIHFSKPQADLVRQSNYSFVNGMTEISLTTLGKRTKMSFNSKGFGQYFQSGWKFGTAKLVHSQGKWYLHIGITKEVADFEPTSQSKIVGIDRGLRFLATVHDHLGKTRFFDGKKALRKRKKFLETRRQLQSKGTKSAKKKLQQLAQRENRWMTDLNHRLAKTLVSIYGSWALFVLEDLTNVTFNTDDLPKALRSSHRSWAFFQLELFLTYKAVTVQSKVLKVSPAFTSQRCPQCGLIEKNNRHHETHEYHCCRCQYRSNDDRLGAMNIKLLGEEWLCGVKHPQIKKITATG

SEQ ID NO: 4917 - protein, 406 aa, unidentified
MTTLGRTAKVRLYPSEIQAIQLADESQEYQRLATIVSEWVFNHDFPMNYLKINHALYKKFRQESPLNSQMIQSVFRTVVARYKTVLEQMRQHPFRYQDETKEWVKTPKDLTWLFKPVHFSRPQADLVRQSNYSFVDGMTKISLTTLGKRTKMSFTNRDFEQYFQNGWKLGTAKLVHAQGKWYLHIGITKEVADFESTKETKVVGIDRGLRFLATIHDHLGKTLFFDGKKILRKRKKFQETRRQLQSKGTKSAKKRLKQLAQRENRWMTDINHRLAKTLVSIYGSRTLFVLEDLTNVTFNTDNLSKALRNSHRSWSFFQLEFFLSYKAAAIQSKVLKVSPAFTSQRCPQCGLIEKANRHHETHEYHCCQCQYRSNDDRLGAMNIKLLGEEWLRGIKHPKIKKVTAIG

SEQ ID NO: 4918 - protein, 480 aa, unidentified
MYRAQQIHIKKGHRFYAYCEDLCRKANYLYNVTNFYIRQLFSGLPKEENERHTLEQEAIDFIYRHLPALNQIQIDYVQKRRRKEATKPEEERKQIPDANLYAMPTLEKPFLPYGLLEGILKLTKHPDYIALPGQVNQKVMRKVYDNWTSFFASLKAYKANPEAFTGRPRIPKYKKKNGVTAVFFSNQVCKVKQEKYLQFPKTSQRLNLGKLGMRIKNLQEVRIIPSYGAYTIEMVCKQEETPSLSEKPTRILGIDLGVNNAATLANNIGQPPVIVKGGVVKSINQFYNKQRAYYTAILRKGKQPNEGPFHSKRLLRLDQKRQRKIKDFLHKASFRIIEQAKAWKIDTIVIGKSKGWKNEVPMRKGAKQTFAFLPFESFIQMLTYKGEQAGIRVLTTEESYTSQADFLANDPLPVYGEFTAAPLFSGKRIARGLYQSGTGIVWNADVNAAYNIIRKAVSDAFRGGNRGVVCVSTPLVVKVR

SEQ ID NO: 4919 - protein, 506 aa, unidentified
MANLHRRVRRQRCDHAHKTADWLAAHHDVICHEALRITNMSRSARGTLDQPGSRVAQKAGLNRSILDAGWGVFLSILTAKAESAGRELIAADPRNTSRTCPSCGHCAADNRVAQAEFRCLRCGLDTHADLVGAVNVLRAGLARRDAAAAAWREATASRRWRSHGCMHTRHPGAPNARPGRAGLVCYGNVIDVTSARAPASLAWIALGVVYVLWGSTYLANRYIILTVPPLTAGAYRFLVGGLLLGIVVFAVAGTRAFRMTAAQFGTTALSGLLLPAWGNGLVVIGQQHVASGLTALLIASVPLHIVVLRALTGDRPRRATVGGVAVGVVGLAVLVLSGPSEGAGGVFGNAWWGPWVVLLAALGWATGTFATTRLPVPPNPFALAAVQMLTGGVIMLVAGAAAGERLDLAAVTAESWWAWAYMAVVVSLGAFGAYAYALAQLPVSTVATYAYVNPVIAVVLGVVIAGERFSAMHLLGGAVVLLAVVLVILAERRAPDRRGALAASRS

SEQ ID NO: 4920 - protein, 489 aa, unidentified
MAKENPSNYKTLQIWIKKGHRMYSYFQECCHNAKNMYNTTNFYIRQVYTGLTQEKELQPLQKEVLANIHKNIGKMNDTQLLAYQKKLEKEKLKPKEEQKEITCNLFSEPNFEKPYVDYNFLDALFKAMIQNDYRALPTQCSQSIMKGLFQNWKSFFASLKDYKKNPNKYAGMPRIPKYIRSSEKEILYTNQDCIIKNGRFLKFPKTKLQLNIGKLGFTEGKLKQVRVIPKYNEYVVELVIDVPSEQQMIEENARYMSIDLGIDNLATIVTNTGMKPVLVKGKHVKSINQYYNKMKSHFTSVLRNGKQTNERPVTSKRIEKLHQKRYLKIKDVFHKVSHHIVKLAQEEEVCKIVIGQNKNWKQETNMGKRNNQSFCHIPHSLLIQMITYKANAVGIQVVVTEESYTSKASFLDNDFIPTYGENDQNTTFSGKRIKRGIYRSANKTLIHADVNAAANILRKVIPNAWTNGIEGLGVKQLANVLTPLTLIVR

SEQ ID NO: 4921 - protein, 489 aa, unidentified
MTKENPSNYKTLQIWIKKGHRMYSYFQECCHNAKNMYNTTNFYIRQVYTGLTQEKELQPLQKEVLDHIHKNIGKMNDTQLLAYQKKLEKEKLKPKEEQKEITCNLFSEPNFEKPYVDYNFLDALFKAMIQNDYRALPTQCSQSIMKGLFQNWKSFFASLKDYKKNPNKYAGPPRIPKYIRSSEKEILYTNQDCIIKNDRFLKFPKTKLKLNIGKLGFTEGKLKQVRVIPKYNEYVVELVIDVSYEQQMIEENARYMSIDLGIDNLATIVTNTGMKPVLVKGKHVKSINQYYNKMKSHFTSILRNGKQTNEGPFTSKRIEKLHQKRYLKIKDVFHKVSHHIVKLAQEEEVCKIVIGQNKGWKQETNMGKRNNQSFCHIPHNLLIQMITYKANAVGIQVVVTEESYTSKASFLDNDFIPTYGENDQNTTFSGKRIKRGIYRSANKTLIHADVNAAANILRKVIPNAWTNGIEGLGVKQLANVLTPLTLIVR

SEQ ID NO: 4922 - protein, 489 aa, unidentified
MAKENPSNYKTLRIWIKKGHRMYSYFQECCHNAKNMYNTTNFYIRQVYTGLTQEKELQPLQKEVLANIHKNIGKMNDTQLLAYQKKLEKEKLKPKEEQKEITCNLFSEPNFEKPYVDYNFLDALFKAMIQNDYRALPTQCSQSIMKGVFQNWKSFFSSLKDYKKNPNKYAGMPRIPKYIRSSEKEILYTNQDCIIKNSRFLKFPKTKLQLNIGKLGFTEGKLKQVRVIPKYHEYVVELVIDVPSEQQMIEENARYMSIDLGIDNLATIVTNTGMKPVLVKGKHVKSINQYYNKMKSHFTSVLRNGKQTNERPFTSKRIEKLHQKRYLKIKDVFHKVSHHIVKLAQEEEVCKIVIGQNKNWKQETNMGKRNNQSFCHIPHSLLIQMITYKANAVGIQVVVTEESYTSKASFLDNDFIPTYGENDQNTTFSGKRIKRGIYSSANKTLINADVNAAANILRKVIPNAWTNGIEGLGVKQLANVLTPLTLIVR

SEQ ID NO: 4923 - protein, 436 aa, unidentified
MKRAVTVKLQPSKEQAKILHQLADIGAKVWNRVNYLRRQQYFQEQIVDFNRTEKTVYEEFKQEIGSATVQQICRKNAEAWRSFFSLLQKKRNGELPNWLKPKPPNYLKEDGKRKPLIVLRNDQYKIDGNKLILKGLGKFKRLEVQFKGRIHLRGKQGRLEITYDPVKRKWYAHISFTVEEKLEGGEWVSIPRTPKGNLSAGIDLDVNNLMAVYVENGESFLVNGRPLKSIDFYWRRKIADYQSKLNKSGAKTSRKLKRMHERAKLQAKHYINTAVRQTVRRLYDLGVSKIVVGYPKGIARNSDKGSKQNFILSHVWRFNYLIKRLTEVAEEYGIVVVVVGEAFTSKVCPVCGKPHEGARFVRGLFKCPATGLVFNADLVGAFNILKKAIKTITPNLGGLYAQGRGNGGKTLPEGLKTRFLVGFNETPQTSLPLARG

SEQ ID NO: 4924 - protein, 434 aa, unidentified
MKRAVTVKLQPSKEQEKILRQLADLGAKAWNRVNYLRRQQYFREQIVDFNSTEKTVYEEFKRKIGSATAQQICRKNAESWRSFFSLLRKKRNGELPENHNPKPPNYRKEDGRRKPLIVLRNDQYKIKGNKLLLKGLGKFGKLEIQFKGRIHLRGKQGRLEITYDEVKRKWYAHISFTVGEKLEGGELVKLPRTPKGSLSAGIDLGVNNLMAVYVENGESFLVNGRPLKSIDFYWRKKIADYQSKLNKSGAKTSRKLRRMHERAKLQAKHYINTVVRQTVRKLYDLGVSRIIVGYPKGIARNSDKGKKQNFILSHVWRFNTVIKRLTEVAEEYGIRVVVVNEAFTSKTCPVCGKPHEGARFVRGLFKCPATGLVFNADLVGALNILKKVVGTITPNLSDLYAQRRGNWGKTAPEGSKTHFTLGLNETPQTSPPVG

SEQ ID NO: 4925 - protein, 437 aa, unidentified
MKRTVTVKLQPSKEQEKILHRLADIGAKVWNRVNYLRRQQYFQEQIVDFNKTEKTVYEEFKREIGSATVQQIARKNAEAWRGFFTLLRKKRNGELPSWLKPKPPNYLKEDGRRKPLIVLRNDQYKIEGNKLILKGLGKFKRLEIQFKGRIHLKGKQGRLEITYDPVKRKWYAHVSFTVEEKLDGGEWVSVPRKPRGNLSAGIDLGVNNLMAVYVENGESFLVNGRPLKSIDFYWRRKIANYQLKLNKSGAKTSRKLRRMHEKAKLQAKHYINTAVRQTIRKLHELGVSKIVLGYPKGIARNSKKDKRQNFLLSHVWRFDYLIKRLTEVAEEYGIRVVVVNEAFTSKLCPVCGKPHEGARFVRGLFKCPVTGLVFNADLVGAFNILKKVVRTITPNLSGLYAQRRGNGGKALPERFEEPVVTGALMRTPQTSPSLARG

SEQ ID NO: 4926 - protein, 436 aa, unidentified
MKRTVTLKLHPSKEHEKILHELADAGAKAWNRVNYLRRQQYFQEQIVDFNKTEKTVYDEFKRGIGSATVQQIARKNAEAWRSFFSLLRKKRNGELPDWLKPKPPNYLKEDGKRKPIIILRNDQYKIEGNKLILKGLGKFKRLEVQFKGRIHLKGKQGRLEIQYNPVKRKWYAYISFTVEKKLESEEWVNVPRQPKGNLSAGIDLGVNNLMAVYPENGESFLVNGRPLKSIDFYWRKKIADYQSKLNKSGAKTSKKLRRMHDKAKLQAKNYINSAVRQTVKRLYELGVSRIVVGYPKGIARNSDKGKKQNFILSHVWRFNHVIKRLTEVAEEYGIKVLVVGEAFTSKTCPVCGKPHEGARFVRGLFKCPATGLVFNADLVGAFNILKKAVETITPNLGGLYAQGRGNGEKALPEGLKARFELGFNEAPQTSPSLARG

SEQ ID NO: 4927 - protein, 450 aa, unidentified
MTKENPSNYKTLQIWIKKGHRMYSYFQECCHNAKNMYNTTNFYIRQVYTGLTQEKELQPLQKEVLDNIHKNIGKMNDTQLLAYQKKLEKEKLKPKEEQKEIKCNLFSEPNFEKPYVDYNFLDALFKAMIQNDYRALPTQCSQSIMKGLFQNWKSFFASLKDYKKNPNKYAGMPRIPKYIRSSEKEILYTNQDCIIKNGRFLKFPKTKLQLNIGKLGFTEGKLKQVRVIPKYNEYVVELVIDVPSEQQIIEENARYMSIDLGIDNLATIVTNTGMKPVLVKGKHVKSINQYYNKMRSHFTSILRNGKQTNEGPFTSKRIEKLHQKRYLKIKDVFHKVSHHIVKLAQEEEVCKIVIGQNKSWKQETNMGKRNNQSFCHIPHNLLIQMITYKANAVGIQVVVTEESYTSKASFLDNDFIPTYGENDQNTTFSGKRIKRGIYRSANKTLINADV

SEQ ID NO: 4928 - protein, 564 aa, unidentified
MNASGRILFFISAKYQERRNSTMRTWRMTFNPKKQKDSVFCQYFLTNTTDARRMYNTANFYIRNTMTGIKKSPELRTPNEVEVLHDVFTGIQKANKAKDSKYQKDLEKYNKGLLDKQPKKPKHFPYPTSKEWLLTYNVLDAVFKYTHNEVYYSMNSQLNQNAIRKAAAAWKGYFKTLKDYRKNPSKYKERPNMPGYLKNPQYVAWFSNQTAKYSVKKDGRAYLRFTKNKDLFCIGKASLYTGLRYVKTEIKPQHGCYLILVTFDDGVELPKAPEKPKRIIGIDPGVDNLAAVVNNFGVYPFLIKGGAVKAANQWFNKKRASLLSAVTAGSDSRHSVKNSHSLYALSRKRDDLFRDIFYRAAWHICRFAIRHQAEVILIGHNKDQKQEIRLGKQNNQSFVSIPFARFEQILTNTAAKCGIPVVVQEESYTSKASVLDEDVIPTYGIDDDHVHFSGKRIKRGLYRCADGTLLNADVNGAANVIRKKYPNAFEGQDLQYLWETTNVVKFTDLYPGAKSICQEKYNGKKHIPSPASKTRHRYRKDTRLQYRILFGKSKYVHASVKKSA

SEQ ID NO: 4929 - protein, 489 aa, unidentified
MTKENPSNYKTLQIWIKKGHRMYSYFQECCHNAKNMYNTTNFYIRQVYTGLTQEKELQPLQKEVLDNIHKNIDKMNDTQLLAYRKKLEREKLKPKEEQKEITCNLFSEPNFEKPYVDYNFLDALFKAMIQNDYRALPTQCSQSIMKGLFQNWKSFFASLKDYKKNPNKYAGTPRIPKYIRSSEKEILYTNQDCIIKNGRFLKFPKTKLQLNIGKLGFTEGKLKQVRVIPKYNEYVVELVIDVPSEQQMIEENARYMSIDLGIDNLATIVTNTGMKPVLVKGKHVKSINQYYNKMKSHFTSILRNGKQTNEGPFTSKRIEKLHQKRYLKIKDVFHKVSHHIVKLAQEEEVCKIVIGQNKSWKQETNMGKRNNQSFCHIPHNLLIQMITYKANAVGIQVVVTEESYTSKASFLDNDFIPTYGENDQNTTFSGKRIERGIYRSANKTLINADVNAAANILRKVIPNAWTNGIEGLGVKQLANVLTPLTLIVR

SEQ ID NO: 4930 - protein, 489 aa, unidentified
MTKENPSNYKTLQIWIKKGHRMYSYFQECCHNAKNMYNTTNFYIRQVYTGLTQEKELQPLQKEVLDNIHKNIDKMNDTQLLAYRKKLEREKLKPKEEQKEITCNLFSEPNFEKTYVDYNFLDALFKAMIQNDYRALPTQCSQSIMKGLFQNWKSFFASLKDYKKNPNKYAGTPRIPKYIRSSEKEILYTNQDCIIKNGRFLKFPKTKLQLNIGKLGFTEGKLKQVRVIPKYNEYVVELVIDVPSEQQMIEENARYMSIDLGIDNLATIVTNTGMKPVLVKGKHVKSINQYYNKMKSHFTSILRNGKQTNEGPFTSKRIEKLHQKRYLKIKDVFHKVSHHIVKLAQEEEVCKIVIGQNKSWKQETNMGKRNNQSFCHIPHNLLIQMITYKANAVGIQVVVTEESYTSKASFLDNDFIPTYGENDQNTTFSGKRIERGIYRSANKTLINADVNAAANILRKVIPNAWTNGIEGLGVKQLANVLTPLTLIVR

SEQ ID NO: 4931 - protein, 477 aa, unidentified
MYRTQQIRIKKGHRLYPYCDHITFLAKNLYNATNFHIRQIFTAFGEEKTLQPLQQEVFDLIEQHLPQMNAIKRKTVEKKREKELKKPMDQRKEIKDAMLFEYPSSQHKWPSYAFLDGLFKASKNEDYLALPGQVNQQIMKMVFQNWKAFFASLKDYQVNPHKYTGRPKLPKYAPKNGRKTCLFSNQVCKVKDNKFLNFPHIKEKLNIGKIGLKGQLQQVRIIPTYGEYTVEVVMEEAEKEPVDLDEKHVMGIDLGINCFATIVDNTGSSPVIIKGKTIKSINQYYNKQRAHYYRVLRNGQGPKDGSFHSKRLQRLDQKRYFKLKDAFHKASFHIVQLALARKVSTIIIGVNKGWKNKVSLRKQDKQHFRSLPHTMLIRMVEYKAEQYGIHVQRQEESYTSKASLMDMDELPIYKKGVQTNVVFSGRRIKRGLYRTKENTCIHADVNAAGNIIRKVVPNAFADGIEGVVSRPLMLSIV

SEQ ID NO: 4932 - protein, 479 aa, unidentified
MYRTQQIRIKKGHRLYHYCDHITFLAKNLYNATNFHIRQIFTAFGEEKTLQPLQQEVFDLIEQHLPQMNAIKRKTVEKKREKELKKPMDQRKEIKDAMLFEYPSAQHKWPSYAFLDGLFKVSENEDYLALPGQVNQQVMKMVFQNWKSYFASLKDYQVNPHKYTGRPKLPKYAPKNGRKTCLFSNQVCKVKDDKYLKFPHTKERVNIGKLGLKGQLQQVRIIPTYGEYTVEVVIMKEEEKKLVELDEKHVMGIDLGVHCLATIVDNTGSSPVIMKGQTVKSINHQYYNKQRAHYYRVLRHGQGPKDGSFHSKRLQRLDQKRYFKLKDAFHKASYHNVQLALARKVSTIVIGANKGWKNKVRLRKQDKQHFQSLPHTMLIRMVEYKAEQYGIKVQRQEESYTSKASLVDMDELPIYEKGVPTNAVFSGRRVKRGLYRTKENTCIHADVNAAGNIIRKVVPNAFVEGIEGVVSRPLMLSIV

SEQ ID NO: 4933 - protein, 477 aa, unidentified
MYNTQQIRIKKGHQLYHYGDHVTFLAKNLYNATNFHIRQIYIAFGAEKPFQPLQQEVLDLIEQHFPQMNAIKRKAVEKKREKEWQKPVDQRKEIKDATLFQSPSSQHKWVHYGFWDGLFKASKNEDYLPLPSQVNQQIMKMVFQNWKSFFASLKDYQVNPHKYTGRPKLPKYAPKNGRKTCLFSNQVCKVKDNKFLKFPHIKEKLNIGKLGLRGKLQQVRIVPTYGEYTVEVVMEEAEKEPVELDEKHVMGIDLGINCFATIVDNTGSSPVIIKGKAIKSINQYYNKQRAHYYRILRHGHGPKEGSFHSKRLQRLDRKRHHRLKDYFHKTSYRIVQLARKRQISTMVIGVNKGWKKDVTIRRKDKQHFKSLPHTMLIRMIEYKAEQYGIKVHRQEESYTSKASLVDRDDLPVYEKGIPKHVVFSGRRIKLGLYHTKENMYIHADVNAAGNIIRKVVPNAFADGIEGVVSRPLMLSIV

SEQ ID NO: 4934 - protein, 478 aa, unidentified
MYRTQQIRIKKGHRLYHYCDHITFLAKNLYNATNFHIRQIFTAFGEEKNLQPLQQEVFDLIEQHLPQMNAIKRRTVEKKRELELKKPMDQRKEIKDAMLFEYPSSQHKWPSYAFLDGLFKVSENEDYLALPGQVNQQVMKMVFQNWKSYFASLKDYQVNPHKYTGRPKLPKYAPKNGRKACLFSNQVCKVKDDKYLQFPHTKERVNFGKLGLKGQLQQVRIIPTYGEYTVEVVIMKEEEKKLVELDEKHVMGIDLGVHCLATIVDNTGSSPVIMKGQTVKSINQYYNKQRAHYYRVLRHGQGPKDGSFHSKRLQRLDQKRYFKLKDAFHKASYHIVQLALARKVSTIVIGVNKGWKNKVKLRKQDKQHFQSLPHTMLIRMVEYKAEPYGINVQRQEESYTSKASLVDMDELPIYEKGVPTNVVFSGRRIKRGLYRTKENTCIHADVNAAGNIIRKVVPNAFADGIEGVVSRPLMLSIV

SEQ ID NO: 4935 - protein, 480 aa, unidentified
MYRTQQIRIKKGHRLYTYCDQLTFLAKNLYNATNFHIRQIFTAFGEGKNLQPLQQEVFDLIDQHLPQMNAIKRKTVEKKRQKELKKPVEQRKEIQDAVLFEFPCAQQKWPSYAFLDSLFKVSENEDYLALPGQVNQQVMRLVYQNWKAYFASLKDYQVHPHQYIGRPKIPKYAPKNGRIACIFSNQVCKVKDDKYLRFPQTKERLNIGKLGLKGPLQQVRIIPSYGEYTVELVIKKEEEKDKEFVELEEQHIMGIDLGIHGLATIVDNTGSSPVIIKGQTVKSINQYYNKQRAHYYRVLRHGQGPKEGSFQSKRLQRLDQKRFFKIKDAFHKASFQIVQLALARKVSTIVIGVNKGWKQKVSLRKQDKQHFQTLPHTMLIRMIEYKAEAYGIQVHRQEESYTSKASLVDMDELPTYEKGVPAKVRFCGRRVKRGLYRTKENTCIHADVNAAGNIIRKVVPNAFAEGIEGVVSRPLMLSIG

SEQ ID NO: 4936 - protein, 449 aa, unidentified
MEKDPAALTDNERGVLDEIARALPVMNAAGKQPTEAGDRYKMPAQGKSFLSYPFLEALLRASNNPDFLCGKLPRQAAQAVLKDCVQEMKSYYAAKREYKRDPGKFRGEPKFPGYNKPSGCCTTTLTNQDCILYDAGRGVHELKLPLTRERLSLGKAPIQGRLKQVKVIPTHGIFVISLTTEVKGELPEPAEVPQRIIGTDLGVNNFSAITNNLGKPCLLFKGGVAKSANQWYNKQMAALVSEQTSRTGAKFVPTPEARMLELRRDNYLSDYMNKVAKLVIRWCVENQVDTIVVGVNKDWKQGSHMGSQNNQSFVSLPFAKFRWQLQYRVERLGIRHIKHEESYTSKASFLDGDFIPVHGEAGADQVKFSGRRFKRGLYRSKSGQVLNSDFNGSAHTTRFARVATRSGRRSWMPLSGASCPTSAECGHPRLLILVTFGESHVASIETPSK

SEQ ID NO: 4937 - protein, 413 aa, unidentified
MKLCFKFKPQINSKQLEIIEELSYHTTKLYNIINYDLRENGFKNYYDIEKQYKSNWHCDFLHSHTRQQMFKVLEQNWKSYFASIKDFGVNPSKYKGLPRPPKFKNTDKNKNEIIFTNLAIRYSDGILKLSLSKAIKSLFNVESLNFEVSKKLQNIINWYELQQARFNYDKIQKVWYLIIIYNKNEVETTSNNVMSIDIGLDNLATITFKDGINQYIYCGKKLKSVNSYINKRISYLQSIEMKKVGSDKFKNTKEINKLRRYRNNYINDYLHKVSKNIIDKAIENNVSRIVIGKLKGVKQNMNFNKSFVQIPIQRLVELITYKAKLHGISIKLQEESYTSGCSAIDLEPITKKYYDKSRRIARGLFQSTYGIVNADINGSLNILRKAEKCIPDLVNTMRDKGNWTHPQRIRVAC

SEQ ID NO: 4938 - protein, 385 aa, unidentified
MNMQRTIRLRLGPTSEQASALLQTLRQHTACFNAVAAYGWENREKNGVRLHHATYHGLRERFPSLPAQLVIAARVRATEAIKSVLARKKKGRKASCPNAVLTPIRYDARTYSIKFPQGIVSLSSVAGRLKVPFAADPHAQHTLGRAVGFDSADLIYRKGRFWLHVVVTIPDVEFQPSGDVVGVDMGLSRPAVCSHNRFFGKRRWKEIERRYFRLRRSLQRKGTRSAKRHLRKLAGKVNRFRRDCDHVLSRRIVDSVQPGTVIVVENLVDIRTRTKQRGRESRRRLHSWSFARLRSFLAYKAAAKGCKVVGVDPRHTSQMCSRCGHVHRRNRRSQSRFLCRACGFELNADLNAARNIARKYLASGGMPAAGGPPSTGLACQPAQAG

SEQ ID NO: 4939 - protein, 424 aa, unidentified
MSRTIRTFEATIPNQRQVRDDLDQLGWAASKLWNVGRYYAQEQWDETGEIPDDGELKAELKSHERYTDLHSQSSQRVLEELAEAFNGWFGKRRNGDDRARPPGYRKNGDAHPRSTVSFKAAGFKHDAQFTRVRLSKGRNLKEHRSDFILCEYQTRPDVDLTEWDIQQVRAIYKHDEWRLQFVCRTTIDPEPPGDEVAGVDLGICNFAAVSFGGESVLYPGGALKEDEYYFTKKKAKCDDSSSREATRLDRKRTGRRTHFLHVLSKAIVEECVERGVGTVVVGDLGGIREDDENDESRNWGDHGNLDLHGWAFDRFTTLLDYKAEAEGIDVELVSERDTSKSCSACGHTDDNQRVERGLYVCEKCDTVANADVNGAENIRQKVLPSLATDGGDRDNGWLAQPAVHLFDRSEGCFAPREQVANREP

SEQ ID NO: 4940 - protein, 560 aa, unidentified
MRTWKMIINPKKNKQDAAFCQYFKTNTADFKCMYNVANFYIRNTMTGIKKSPEERTHLETEVLHYVFTGIQKANEAIGQKRMKKKFEDLKLAQIGGMNCAVIAYSLASQEPFQYPTVKKWFLSYNTLDAIFKFTDNPVYKRMNSQVNQNAIRKVIAAWEGYFESLKQYKTNPAGYTGKPKIPGYKNTEESTAWFSKQVAKLKEEDGKSYLQFVNQKERFCIGKTSTYKGLQYVKTEIKPVYGRYCLLVTFDDNVKAVEPPVNPERILGLDPGVNNFLGVSNNFGAVPFVIKGGAVKSVNQRFNKRRSALLSALTKGSDSQHSVKYSEQLNTLSKKRDSFMRDYFYKCAWYVCRYAQAVGVEVIVMGYNEGQKQEITLGDKNNQHFVAIPYLKFITILKTVAAKCGIAVIVREESYASRASLLDMDDIPTYRQGDDVKYQFSGKRIHRGLYRSGNGTVMNADINGASNILRKEYSHAFDNVKDFAYLYETTLAIGYKDLYNNAKTISERPDGYRYHKAGFGSKACHKYRKWSRMKYRKLFGKSKSVWIANKMDKTQDKHAA

SEQ ID NO: 4941 - protein, 422 aa, unidentified
MLKTTRTYRAKIVNHTQVSDDLDDCGHSASKLWNVARYHTQKEWNETGEIPSEAGLKRELKDHERYSDLHSQSSQRVLEELAEAFNGWFKKRKNGDTDANPPGYRKRGDNHPRSTVIWKQMGIKHDSKHNQLRLSKGFNLKNHRSDFILAEYETRPDVTVENIQQVRAVWNGDRWELHLVCKVEIPVEDAPGDNTAGIDLGIKNYLAIAYDDGDAELYPGNVLKQDKHYFTRDEYNTEGENGPSKRALRARQKLSRRKNHFLHALAKHIVERCIDHEVGRIAIGDLSKIREEENGDARNWGKRGNKKLHGWEFDRFTTLLEYKAEEHGILVDRKSERDTSKTCSCCGRKRDANRVERGLYVCASCGATMNADVNGAVNIRRKITQNPPTGDMSNGRLARPVAYLFNQTSGRFAPSEQAGCEP

SEQ ID NO: 4942 - protein, 422 aa, unidentified
MLETTRTYRAKIVNHPQVSDDLDECGHSASKLWNVARYHTQQEWDETGEIPSEADLKRGLKDHERYSDLHSQSSQRVLEELAESFNGWFKKRKNGDTDANPPGYRKRGDNHPRSTVTWKQMGIKHDSKHNQLRLSKGFNLKNHRSDFILAEYETRPDVTVENIQQVRAVWNGDRWELHLVCKVEIPVEDAPGDNTAGIDLGIKNYLAIAYDDGDAELYPGNVLKQDKHYFTRDEYDTEGENGPSRRALRARQKLSRRKDHFLHALTKHIVERCIDHEVGRIAIGDLSKIREAENGDSRNWGNRGNKKLHGWEFDRFTTLLEYKAEEHGILVDRKSERDTSKTCSCCGRKRDANRVERGLYVCDSCDVVMNADVNGAVNIRRKITQNPPTGDMSNGRLARPVAYLFNQTSGHFAPSEQVGCKP

SEQ ID NO: 4943 - protein, 559 aa, unidentified
MRTWAMDFIPAKNKTEAAVCQYFKTNTTDFKCMYNTANFYIRNTMTGLKKSPEERTHLETEVLHYVFTGIQKANEDIGPKQMARILRDRRSAKAGGMQCAVRAYKLTLQEPFRYPTREKWFLSYGVLDAIFKFTDNPVYKRMNSQVNQNAIRKVVSAWTGYFELQKKYREDPLHNDKPKIPGYLKNTESTAWFSSQTAKLQEENGKYWLRFVNLKERVCIGSTSLYEGMKYVKTEIKPVYGYYRILVTFDDRVKEKEPPESPKRILGLDPGMGNFLAVANNFGGVPFVIRGGAIKSANQRFNKKRAALISSLTKGKDSTKSVKNSEQLRTLSRKRENFLRDYFYKCAWYICRYAQAAGVEVIVMGHNKGQKQEISLLDSTNQNFVSIPFTKFITALTSVAAKCGIAVVLTEESYTSQSSLLDMDEISFYSKGNTGGYTFSGRRVKRGLYRSGDGILINADINGAGNIIRKEYPDAFAGLKDLSYLYTTTMSIGYKDLYKEAKAPKKRPCRFHKEGRSSRVRYRERKELRTYYRKFWGDAKYIWKPEEKTGQEGSEDKAV

SEQ ID NO: 4944 - protein, 419 aa, unidentified
MAIETVVRTHRASIRNQRQVRDGLDTLGFAAAKLWNVARWTAGRVWDACGQIPDHSVLKSYLKSHERYADLNAQSSQRVLEELDEAFRGWYGHRDSGDENANPPGYRKNGDEHPRSTVTFKEDGFKHDARNGYIRLSKGRNTKAHWSDFILCAYDADPDVEIENVQQVRAVFEHGEWRLHIVCQHEIEITSAGDGTAGVDLGICNVAAVSFGDESVLYPGGVLKEDEYYFAKERAKCNDSFSREAQRLDRKRTDRRTHFLHALSKHIVQECVECEVGTIVVGDLGGIREDENGPRNWGDHGNMDLHGWAFDRFTTLLDYKAEAEGIEVETVSERDTSKTCSVCGTKADSQRVERGLYVCDDCGLVANADTNGAENIRQRVLPNPRREDRDNGWMAQPAVRLFDKARGDFLPREQMDCEL

SEQ ID NO: 4945 - protein, 423 aa, unidentified
MPTRTIRTFEATILNQRQVRDDLDQLGWAASKLWNVGRYYAQGMWDDTGEIPDDGELKRELKGHERYTDLHSQSSQRVLEELAEAFNGWFAKRRNGDDRARPPGYRKHGDSHPRSTVSFKAAGFKHDAQYQRVRLSKGRNLKEHRSDFVLCEYKTRPDVDLTEWDIQQVRAVHKRGEWRLQFVCRTTIDPQPPGDEVAGIDLGICNFAAVSFGGDSLLYPGGALKEDEYYFAKKRAECDDSFSREARRLDQKRTDRRTHFLHTLSKEIVAKCVEREVGTIVVGDLGGIREDENGDPTNWGDHGNMDLHGWAFDRFTTMLDYKAEAEGIEVETVSERDTSKSCSVCGRCDDSQRVERGLYVCDECGLVANADTNGAENIRQKVLPNLATDGGDRDNGWLAQPATRLFSRTRGAFFPRSEAGCEP

SEQ ID NO: 4946 - protein, 422 aa, unidentified
MANRTVTRTYRARVRNHSQVRDDFDSLGFAASKLWNVARWTVGRVWDACGQIPSAFDLQKYLKSHERYADLHSQSSQRVLAELGEAFTAWYGHRGNGNTKANPPGYRKHNDEHPRSTVTFKQAGFKHDAANQRIRLSKGSNLKDGWGDFILCEYDVIGPRDTTVEHVQQVRAVYEHGVWRLHIVCRVEVDVADSPGDRTAGVDLGICNVAAVSFGDESLLYPGGSLKEDEYYFAKQRAKCADSFSREARRLDRKRTDRRTHFFHTLSKEIVEQCAERGVGTVFVGDLGGIRDGDDGPKNWGRHGNLDLHGWAFDRFTTMLTYKAEIRGIAVETVSERDTSKTCSACGTKSDSQRVERGLYVCEECGTVANADTNGAENIRQKSTSESSHEDRSTGWLAQPAVRLFDKTRGGFLPPEQATREP

SEQ ID NO: 4947 - protein, 426 aa, unidentified
MADSMVTRTYRARVRNHSQVCDDLDSLGFAAAKLWNVGRWTVQRVWDACGQIPDANALMSYLKGHERYADLHSQSSQRVLQELGEAFTGWYGKRDNGDTKANPPGYRKNGDEHPRSTVTFKTAGFKHDAANNRIRLSKGKNLKDGWSDFVLCEYDVIGSPETRVENVQQVRAVHEHGEWRLHIVCRVEVDVPESSGNEVAGIDLGICNFAAVSFGGESLLYPGGALKEDEYYFAKKRAECDKSSSREARRLDRKRTDRRTHFLHTLSKTIVAECAKRDVGTIVVGDLAGIREDDNGETADWGDHGNLDLHGWAFDRFTTMLDYKAEVKGISVEPVSERDTSKSCSACGRTDDSQRVERGLYVCDECGLVANADSNGAENIRQKVLPNPRREDRDNGWLAQPAVRLFDRSEGGFAPREQVAQTNREP

SEQ ID NO: 4948 - protein, 393 aa, unidentified
MPRVVHRTARVALRVTPGQRRRCFGLLRSAGDVWACVLEVNAWRRRRRDAPLVGYQQLCRELSASGPGTFGDLDTTGARSVLRRFSDAWFAAAKRRKAGDLSARFPRRRRGLVPVRWYHGTFTLDDRRVRLPTARGTSPLWVRLAREVPYPAEQVRSVTLLCEGGRLFLDVTAEVPVTVYPPGEQPDPGRVAGLDLGIIHPYAVAGPRGEGLLVSGRAIRAEHRMHLADTKARRRAVARRTPKPGQKGSRRWRQYRRRARLVEGRHRRRVRQAQHEAARSVVSWAVEQRVGVLHVGDPRGVLDIDAGRRHNLRLRQWQIGRLLQVLTDKATLAGITVRLVDERGTSSTCPACRRRVPKPRGRTLSCPHCRFSGHRDLVAAASIATRTPGGGPT

SEQ ID NO: 4949 - protein, 542 aa, unidentified
MRTWRMTFNPKKQKDSVFCQYFLTNTTDARRMYNTANFYIRNTMTGIKKSPELRTPNEVEVLHDVFTGIQKANKAKDSKYQKDLEKYNKGLLDKQPKKPKHFPYPTSKEWLLTYNVLDAVFKYTHNEVYYSMNSQLNQNAIRKAAAAWKGYFKTLKDYRKNPSKYKERPNMPGYLKNPQYVAWFSNQTAKYSVKKDGRAYLRFTKNKDLFCIGKASLYTGLRYVKTEIKPQHGCYLILVTFDDGVELPKAPEKPKRIIGIDPGVDNLAAVVNNFGVYPFLIKGGAVKAANQWFNKKRASLLSAVTAGSDSRHSVKNSHSLYALSRKRDDLFRDIFYRAAWHICRFAIRHQAEVILIGHNKDQKQEIRLGKQNNQSFVSIPFARFEQILTNTAAKCGIPVVVQEESYTSKASVLDEDVIPTYGIDDDHVHFSGKRIKRGLYRCADGTLLNADVNGAANVIRKKYPNAFEGQDLQYLWETTNVVKFTDLYPGAKSICQEKYNGKKHIPSPASKTRHRYRKDTRLQYRILFGKSKYVHASVKKSA

SEQ ID NO: 4950 - protein, 422 aa, unidentified
MLKTTRTYRAKIVNHQQVSDDLDNCGHSASKLWNVARYHIQQEWDSTGEIPSEADLKRELKDHERYSDLHSQSSQRVLEELAESFNGWFKKRKNGDTDANPPGYRKRGDKHPRSTVTWKQNGIKHDSKHNQLRLSKGFNLKNHRSDFILAGYETRPDVTVEKIQQVRAVWNGDRWELHLVCKVEIPVEDAPGDDTAGIDLGISNYLTIAYDDGDAELYPGNVLKQDKHYFTRDEYDTEGENGPSRRALRARQKLSRRKDHFLHALAKHIVEQCIGHEVGRIAVGDLSKIRVDENGESRNWGRGGNKKLHGWEFDRFTTLLEYKAEEHGILVDRTSERDTSKTCSCCGRKRDANRVERGLYVCESCGATMNADVNGAVNIRRKITQNPPTEDMSNGRLARPAVHLFNQTSGRFAPSEQVSCEP

SEQ ID NO: 4951 - protein, 413 aa, unidentified
MKLSFKFRPNINPMQLEIIEELSYHTTKLYNIISYDLRKNGFKNYYEIEKLYKNNWHCDFLHSHTRQQMFKILEQNWKSYFASIKDFGVNPSKYKGLPRPPKFKNTERNKNEIIFTNLAIRFQDGILKLSLSKSIQKLFKVDSLNFEVSNKLQSLINWNRLQQARFNYDKVQKCWYLIVIYNKDEVENSNDNVMSIDIGLDNLATITFKNGINQYVYCGKKLKSVNSYANKRIAYLQAIEMKKYGSDKFKNTKEINRIRKYRNNYINDYLHKVSKNIIDKAIKNNVGKIVIGKLKDIKQDMNYNKSFVQIPIQRLVELITYKAKLKGIKIKLQEESYTSGCSAIDLEPVTKKYYNKSRRITRGLFKSGYGILNADINGSLNILRKFEKCIPHLVNAMRDKGNWTHPQRIRIAC

SEQ ID NO: 4952 - protein, 489 aa, unidentified
MTKENPSNYKTLQIWIKKGHRMYSYFQECCHNAKNMYNTTNFYIRQVYTGLTQEKELQPLQKEVLDNIHKNIGKMNDTQLLAYQKKLEKENLKPKEEQKEIKCNLFSEPNFEKPYVDYNFLDALFKAMIQNDYRALPTQCSQSIMKCLFQNWKSFFASLKDYKKNPNKYAGMPRIPKYIRSSEKEILYTNQDCIIKNGRFLKFPKTKLQLNIGKLGFTEGKLKQVRVIPKYNEYVVELVIGVPSEQQMIEENARYMSIDLGIDNLATIVTNTGMKPVLVKGKHIKSINQYYNKMRSHFTSILRNGKQTNKGPFTSKRIEKLHQKRYLKIKDVFHKVSHHIVKLAQEEEVCKIVIGQNKSWKQETNMGKRNNQSFCYIPHNLLIQMITYKANAVGIQVVVTEESYTSKASFLDNDFIPTYGENDQNTTFSGKRIERGIYRSANKTLINADVNAAANILRKVIPNAWTNGIEGLGVKQLANVLTPLTLIIH

SEQ ID NO: 4953 - protein, 471 aa, unidentified
MPRRRDPAAPRVVHRTARVALRVTAGQRRRCFGLLRSAGDVWACVLEVNAWRRRRRDVPLSGYQELCRELATSGPGTFGELDSVGARSVLRRFSDAWFAAAKRRSAGDVSARFPRRRRGLVPVRWYHGTFTLDGLRVRIPTAKGSAPLWVRLAREVPYPVEQVRSVTLLCVGGRLFLDVTAEVPVAVYPPGEQPDPACVAGVDLGIIHPYAVAGPDGEALLVSGRAIRAEHRMHLADTKARRRGVARRAPKPGEKGSRRWRQYRRRARLVEGRHRRRVCQAQHEAARTVVSWAVRQRVGVLHVGDPRGVLDLSAGRRHNLRLRQWQIGRLIQILVDKATLAGISVRLVDERGTSSTCPACRRRVPKPRGRTLSCPHCAFSGHRDLVAAASIATRVPGGGSTTLAAVVLPEVVTHRRAGRHLPGAGRSRRDPRRPPRAARGSVGPRRPAPPGGESLAPKARIHNAHRKPGER

SEQ ID NO: 4954 - protein, 459 aa, unidentified
MWACLLEVNAWRRRRRDAPLVGYQQLCRELSGSGPGTLGELDTTGARSVLRRFSDAWFAAAKRRKDGDLSARFPRRRRGLVPVRWYHGTFTLDGRRARIPTAKGTAPLWIRLAREVPYPAEQVRSITLLCEGGRLFLDVTAEVPLAVYPPGEKPDPARFAGVDLGIIHPYAVAGPDGEGLLVSGRAIRAEHRMHLADTKARRRAVARRAPKRGEQGSRRWRKYRRRARLVEGRHRRRVRQAQHEAARQVVSWAVERRVGVLHVGDPRGVLDIAAGRRHNLRLRQWQIGRLLQVLTDKATLAGITSGWSTNAAPRPPAPPAAHAFRNLVAGPCPARAVDSPGTATWSRPPASPPAPRAADPPPRQPLLCCRRWSRTVEPAGTSPVPGGPGEDQLARGGPPHHLVGSRSPTRRGSTTTTEHPVNVRGHRTRGRMRRVSIGGRAGAGWGRIGSSRSAPRVGR

SEQ ID NO: 4955 - protein, 477 aa, unidentified
MPRRRDPAAPAVVYRTARVGLRLTVGQRRRCFGLLRSAGDVWACVLELNAWRRQRRDKPLASYQELCRELAASGPGTFGELDSTGARSVLRRFSDAWFAAAKRRRDGDATARFPRRRRGLVPVRWYHGTFTLDPGGRRVRLPTARGGRPLWLRLARSLPYPAEQVRSVTLLAEGGRLFLDVTAEVPVTVYEPGCGPDPARIAGVDLGVIHPYAVAGPDGQALLVSGRAIRGEHRMHLADTKQRRRAVAGRAPTRGQRGSRRWRKYRRRSRAVEGRHGRRVRQAQHEAAKTVITWAVQQRVGTLHMGDPRGVLQLAAGRRHNLRLRQWQVGQLIRILVDKATLAGITVHLVDERGTSSTCPGCSRRIPKPSGRVLTCPHCALTGHRDLVAAASIATRTPGGGPTTPAGSSVVLPGVVTHRRAGRHLPGAGRSRRDPRRPPAPRAARGSVGQRWPAPPHSGGESLAHTGEDPQHPPETR

SEQ ID NO: 4956 - protein, 413 aa, unidentified
MTNQQQVRDDLDQLGWAASKLWNVGRYYAQKQWDETGKIPDDGELKAELKGHERYTDLHSQSSQRVLEELAEAFNGWFGKRRNGDDRARPPGYRKHGDSHPRSTVSFKAAGFKHDAQFTRVRLSKGRNLKKHRSDFILCEYQTRPDVDLTAWDIQQVRAVYKHDEWRLQFVCRTTIDPEPPGDEVAGVDLGICNFAAVSFGGESVLYPGGALKEDEYYFTKKKAKCDDSSSREATRLDRKRAGRRTHFLHALSKSIVNECVERGVGTLVVGDLGGIREDDENGEPRNWGDHGNLDLHGWAFDRFTTLLDYKAEAEGIDVELVSERDTSKSCSACGHTDDNQRVERGLYVCEKCNTVANADVNGAENIRQKVLPSLATDGGDRDNGWLAQPAVRLFDRSEGRFAPREQVVNHEP

SEQ ID NO: 4957 - protein, 438 aa, unidentified
MKRSVTVKLQPSKEQEEKLYQLADAGAKVWNRVNYLRRQQFFQGQIVDFNTTEKTVYEKFKKEIGSATVQQIARKNAEAWRSFFTLARKKRNGELPEWLKPKPPNYLKEDGKRKPLIVLRNDQYRIEGSKLILKGLGKFKRLEIQFKGRIHLRGKQGRLEITYDEVKRKWYVHISFSEVRERLEGEEWVKLPRKPKGSLSAGIDLGVNNLMAVYVENGESFLVNGRPLKSIDFYWRKRTAEYQSKLNKSGQKTSRKLRRMHERAKLQAKHYINTAVRGTVQRLYELGVSKIVVGYPKGIARNSDKGKKQNFILSHVWRFNTVIKRLKEVAEEYGIEVMVVGEAFTSQTCPVCGKPHDGARFVRGLFKCPATGLTFNADLVGAFNILKRAVKTITPNLGGLFAQRRGNGGKTLPEGFKEPSSRVVLMRTPQTSPSMARG

SEQ ID NO: 4958 - protein, 437 aa, unidentified
MKRSVTVKLQPSKEQEEKLHQLADAGAKVWNRVNYLRRQQFFQGQIVDFNKTEKTVYEEFKKEIGSATVQQIARKNAEAWRSFFTLARKKRNGELPTWLKPKPPNYLKKDGKRKPLIVLRNDQYRIEGSKLILKGLGKFKRLEIQFKGRIHLKGKQGRLEIIYDEVKRKWYAHISFTVEEKLEGEEWVKLPRKPKGNLSAGIDLGVNNLMAVYVENGQSFLVNGRPLKSIDFYWRKRIAEYQSKLNKSGAKTSRRLKRMHEGAKLQAKHYINTAVRGTVQRLYELGVSKIVVGYPKGIAQNPGKGKKQNFILSHVWRFNTVIKRLKEVAEEYGIVVEVVDEAFTSKTCPVCGKPHEGARFVRGLFKCPATGLTFNADLVGAFNILKTVVGTITPNLSGLYAQRRGNWPKTRPEGFEEPSSRVALMRTPQTSPSMARG

SEQ ID NO: 4959 - protein, 436 aa, unidentified
MKRSVTVKLQPSKEQEKILLQLADRGAKVWNRVNYLRRQQFFQGQIVDFNTTEKTVYDEFKKEIGSATVQQIARKNAEAWRSFFSLLRKKRNGELPDWLKPKPPNYLKEDGGRKPLIVLRNDQYRIEGNRLILKGLGKFKRLEIQFKGRIHLKGRQGRLEITYDEVKRKWYAHVSLTVEEKLEGEEWVKLPRRPKGGLSAGIDLGVNNLMAVYVESGESFLVNGRPLKSIDFYWRRKIADYQSKLNKSGQKTSRRLKRMHEGAKLQAKHYINTAVRGTVQRLYELGVSKIVVGYPRGIARNSGKGKKQNFLLSHVWRFNTVIKRLKEVAEEYGIEVMVVGEAFTSQTCPVCGKPHEGARFVRGLFKCRATGLVFNADLVGAFNILKKVVKTITPNLSGLYAQRRGNWPEARPEGLKARFELGFNETPQTSPSLARG

SEQ ID NO: 4960 - protein, 436 aa, unidentified
MKRSVTVKLQPSKEQEEKLHQLTDLGAKVWNRVNYLRRQQFFQGQIVDFNTTEKTVYEEFKKEIGSATVQQICRKNAEAWRSFFTLARKKRNGELPEWLKPKPPNYLKECEKRKPFIILRNDQYRIEGNRLILKGLGKFKRLEIQFKGRIHLKGRQGRLEITYDEVRRKWYAHISFTVKEKLESEEWVNLPRKPKGNLSAGIDLGVNNLMAVYVESGESFLVNGRPLKSIAFYWQKKIADYQSKLNKSGQKTSRKFRRMHGKAKLQAKHYINTVMRQTVKRLYDLGVSTIIVGYPKGIAQNSDKGKKQNFILSHVWRFNTVIKRLKEVAEEYGIQVVVVNEAFTSKTCPVCGKPHEGARFVRGLFKCPATGLTFNADLVGAFNILKKVAKTITPNLGGLFAQRRGNWPEARPEGLKARFELGFSEAPQTSPPMARG

SEQ ID NO: 4961 - protein, 437 aa, unidentified
MKRSVTVKLQPSKEQEEKLHQLADLEAKVWNRVNYLRRQQFFQGQIVDFNKTEKTVYEEFKKEIGSATVQQIARKNAEAWRSFFTLARKKRNGELPTWLKPKPPNYLKECEKRKPLIVLRNDQYRIEGSKLILKGLGKFRKLEIQFKGRIHLRGKQGRLEITYDEVKRKWYAHISFTVEEKLEGEEWVKLPRKPKGDLSAGIDLGVNNLMAVYVENGQSFLVNGRPLKSIDFYWRKRIAEYQSKLNKSGAKTSRRLKRMHERAKLQARHYINTSVRGTVRKLYELGVFKIVVGYPKGIAQNPGKGKKQNFILSHVWRFNTVIKRLKEVAEEYGIVVEVVDEAFTSQTCPVCGRPHEGARFVRGLFKCPATGLVFNADLVGAFNILKKVVKTITPNLSGLYAQRRGNWPEARPEGFEEPASRVIMMRTPQTSLPMARG

SEQ ID NO: 4962 - protein, 437 aa, unidentified
MKRKVTLKLQPSKEQEKTLFQLADLGAKVWNRVNYLRRNQYFQEQIVDFNTTEKTVYEEFKRKIDSATVQQIARKNAEAWRSFFSLLRKKRNGELPDWLKPKPPNYLKEDGRRKPLIVLRNDQYRIEGNKLILKGLGKFKRLEIQFKGRIHLKGRQGRLEITFDPVKRKWYAHISFTVEEKLEGGEWVVLPRTPKGSLSAGIDLGINNLMAVYVENGESFLVNGRPLKSIDFYWRRKIAEYQSKLNKSGTKTSRKLKGMHEKAKLQARHYINTVVRQTVRRLYELGVSKIVVGYPKGIARNSDRGKKQNFILSHVWRFNYVIKRLTEVAEEYGIQVLVVNEAFTSQTCPVCGKPHEGARFVRGLYSCPATGLVFNADLVGAFNILKKIAKTITPNLGGLYAQGRGNGGKTLPEGFEEPVLTGSLMRTPQTSPSMARG

SEQ ID NO: 4963 - protein, 436 aa, unidentified
MKRSVTIKLQPSKEQEKILFKLADTGAKVWNRVNYLRRQEFFEGKPVDFNRTEKIVYEEFKKEIGSATVQQVCRKNAESWRSFFSLLRSWRNGELPEWLKPKPPNYLKDDGKRRQLIILRNDQYKIEGNKLILKGLGKFKRLEVQFKGRIHLKGKQGRLEITYDPVRRKWYAHISYTVEERLIGDEWVKIPRQPLGNLSAGIDLGVNNLMAVYLENGESFLVNGRPLKSIDFYYQKKIADYQSKINKSGAKKGRKLSRMHQKAKLQARHYINTAVRQTVEKLYQLGVSGIVVGYPKGISRNSDKGRRQNFLLSHVWRFNYVIKRLKEVAEEYGILVEVVDEAFTSKTCPVCGKPHEGARFVRGLFKCPATGIVFNADLVGAFNILKKVVRTITPNLGGLYAQGRGNWPKARPEGSKTRFLAGLNEAPQTSPSMARG

SEQ ID NO: 4964 - protein, 436 aa, unidentified
MKRSVTVKLQPSKEQAKILSELADLGAKVWNRVNYLRRQQFFEDKIVDFNSTEKTAYEEFKREIGSATVQQICRKNAEAWRSFFSLLQKKRNGELPSWLKPKPPNYLKEEGKRKPLIVLRNDQYRIEGNRLILKGLGKFKKLEIQFKGRIHLNGKQGRLEITYDPVKRKWYAHISLTVDEKFEGGEWVKLPKTPKGNLSAGIDLGVNNLMAVYVENGESFLVNGRPLKSIDFYWRRRIAEYQSKLNKSGAKTSRKLKRMHEKAKLRAKHYINTAVKQTVKKLYELGVSRIVVGYPKGIARNSDKDKKQNFLLSCVWRFNTVIKRLREVAEEYGISVMVVNEAFTSKTCPVCGKPHEGARFVRGLFKCPATGLVFNADLVGAFNILGKVVKTITPSLEGLKAFKVRGNWPKTRPEGFEEPALKGSLMRTPQTSLPLS

SEQ ID NO: 4965 - protein, 435 aa, unidentified
MKRSVTVKLQPSREQEKILHRLADIGAKVWNRVNFLRRRQYFQEQIVDFNSTEKTVYEEFKREIGSATVQQIARKNAEAWRSFFSLLRKKRNDELPDWLKPKPPNYLKEDGKRKPLIVLRNDQYRIEGNMLILKGLGKFKKLEVQFKGKIHLKGKQGRLEITYDKAKRKWYAHISITVEKKLEGEEWVKVPKQPLGSLSAGIDLGVNNLMAVYVENGESFLVNGRPLKSIDFYWRRKIADYRSKLNKSGAKTSRKLKRMHEKAKLQAKHYINTAVRQTVRRLYDLGVSRIVVGYPKGIARNSDNGKRQNFILSHVWRFNTVIQRLKEVAEEYGIRVLVVNEAFTSKTCPVCGKPHEGARFVRGLYSCPGTGLVFNADLVGAFNILKKVVRTITPNLGGLFAQGRGNGGKALPEGSKTRFILGLNETPQTSPLARG

SEQ ID NO: 4966 - protein, 434 aa, unidentified
MKRTVTVKLQPSKEQEKALFQLADLGAKAWNRVNYLRKQQFFQGQIVDFNKTEKTVYEEFKREIGSATVQQIARKNAEAWRSFFSLLRKKRNGELSSWLKPRPPNYLKEDRKRKLLIVLRNDQFKIEGNKLILKGLGKFKRLEVQFKGRIHLKGEQGRLEITYDPVRRKWYAHLSLTVEEKLEDKEWIKLPRTPKGSLSAGIDLGVNNLMAVYVENGESFLVNGRPLKSIDFYWRRKIAEYQSKLNKSGAKTGRKLKRMHDKAKLQAKHYINTVVRQTVRRLYDLGVSKIVVGYPKGIARNSDKGKKQNFILSHVWRFNYVIKRLTEVAEEYGIVVEVVGEAFTSQTCPVCEKPHEGARFVRGLFKCPATGLVFNADLVGAFNILRKVAKTITPSLPSLSAGRGNWPKTGPEGFKEPFSRVALMRTPQTSPPLG

SEQ ID NO: 4967 - protein, 437 aa, unidentified
MKRTVTLKLQPSKEQEKTLFQLADLGAKAWNRVNYLRRQQFFQGQIVDFNKTEKTVYEEFKREIGSSTVQQIARKNAEAWRSFFTLLRKKRNGELPNWLKPKPPNYLKEDGRRKPLIILRNDQYRIGGNRLILKGLGKFKRLEIQFKGRIHLKGKQGRLEIIYDPVKRKWYAHVSLTVEEKLEGGEWIKLPRTPRGNLFAGIDLGVNNLIAVYVENGESFLVNGRPLKSIDFYWRKKIAEYQSKLNKSGAKTSRKLKKMHEKAKLQAKHYINTAVRQTVRKLYELGVSKIIVGYPKGIARNSDKGKRQNFLLSHVWRFNYVIKRLTEVAEEYGIPVEVVNEAFTSKLCLVCGKPHEGARFVRGLFKCPTTGLVFNADLVGAFNILKKVVKTITPNLSGLYAQRRGNWPKARPEGFEEPVVMGSLMRTPRTSPSLARG

SEQ ID NO: 4968 - protein, 437 aa, unidentified
MKRTVTVKLQPSKEQEKTLNQLADTGAKVWNRVNYLRRQQFFEDKIVDFNSTEKTVYEEFKREIGSATVQQIARKNAESWRSFFSLLRKKRNGELPSWLKPKPPNYLKEDGRRKPLIVLRNDQYKIEGNKLILKGLGKFKRLDIQFKGRIHLKGKQGRLEITYDPVRRKWYAHISLTVEEKLEGEEWVSVPRHPKGSLSAGIDLGVNNLMAVYVENGESFLVNGRLLKSIDFYWRRKIADYQSKLNKSGAKTSRKLKKMHGNAKLQAKHYINTAVRQTVKKLYDLGVSKIVIGYPKGIARNSDRGKKQNFLLSHVWRFNYVIKRLTEVAEEYGIQVVLVNEAFTSKTCPVCGKLHERARFVRGLFKCPATGLVFNADLVGAFNILKRAVKTITPNLGGLYAQRRGNWPEARPEGFEEPVPTGSLMRTPQTSPPTARG

SEQ ID NO: 4969 - protein, 421 aa, unidentified
MMFAAKRTNIFDLSDNELEVMSEFEWMNYYLPKDKQKILPPSGSISYATLDCMMKLCKNPDYCCTGLPRQTAQQILKMTLRDICSFFAALKSYKRDPGKFTGRPKMPGYKHKKGACAFIVTNQDCVIRKNKKHRYTAKLPFTKQVVRLGREVHGKFVQLNVTPRNGTYKLSFVFDDGTNAPATADTAERIAAIDLGVDNLMAVTNNVGAECLLFKGGAAKSANHYFNQMSARIQSEQTSGSTDKFFPTKRYYRILQKRNNRINDCMLKDCKRLITWCVEKRIDTIVIGENKFWKQECSMGGTSNQNFMQIPFERLKRIITYSAERLGIRIIYQEESYTSKASFLDRDKIPVYSRDSEEHHKFSGVREKRGLYRSADGTKMNADLNGSANILRKAIPDAFESGIEPDFRNIRAYYHPDLKLA

SEQ ID NO: 4970 - protein, 421 aa, unidentified
MMFAAKRTNIFELSDNELEVMSEFEWMNYYLPKDKQKILPPSGSISYATLDCMMKLCKNPDYCCTGLPRQTAQQILKMTLRDICSFFAALKSYKRDPGKFTGRPKMPGYKHKKGACAFIVTNQDCVIRKNKKHRYTAKLPFTKQVVRLGREVHGKFVQLNVTPRNGTYKLSFVFDDGTNAPATADTAERIAAIDLGVDNLMAVTNNVGAECLLFKGGAAKSANHYFNQMSARIQSEQTSGSTDKFVPTKRYYRILQKRNNRINDCMLKDCKRLITWCVEKRIDTIVIGENKFWKQECSMGGTSNQNFLQIPFERLKRIIAYSAERLGIRIIYQEESYTSKASFLDRDKIPVYSRDSEEHHKFSGAREKRGLYRSADGTKINADLNGSANILRKAIPDAFERGIEPDFRNIRAYYHPDLKLA

SEQ ID NO: 4971 - protein, 431 aa, unidentified
MNVHIKNTVPTVSNIVVFFHRPNIMESMKRLQAYKFQILPSGEQRRDMRRFAGACRFVFNKALAWQNERYAAGKTVKFSYTTLANLLPLWKQDPAISWLKESPSQPLQQTLKDLERAYLNFFAKRADFPRFKKKGHADSFRYPQGYKLDQANSRIFLPKLGWLRYRNSREVLGVVKNVTVSGKQGKWFVSIQTEREIETPAHPSTAIVGIDMGIARFATLSDGSYFAPLNSFKHQEKALVKAQRAMNRKQKFSNNWKKAKANVQLIHARIGNARRDYLHKATATISQNHAMVGIEDLQVRNMSRSASGTTGTPGKNVRAKSGLNKAILDQGWFEFRRQLDYKLAWNGGQLVAVPPRNTSRTCLCCGHVVKENRLSQSRFECVECGFEENADLVGAINVLRAGHARLACADTSPAVGASGQEPTEATQAIAA

SEQ ID NO: 4972 - protein, 406 aa, unidentified
MTVLGRTLKLRLYPNTIQAQQLLAMSHEYQCLANLTSQWVFDHDFPLSPLKINHALYQLFRQTSPLNSQMIQSVFRTVVARYKTVLAQMKQHPYRYQDEYGKWVQMPKDLTWLFKPIHFSRPQADLVRNSNYSFVNDSTEVSLTTLEKRIKMSFTIKGFEQYFQSGWKLGTARLVHSQGKWALHIGITKEVADFTVGQQTQVVGIDRGLRFLATAYDHMGKTLFFSGQKILLKRKKFLENRRHLQSKGTKSAKKKLKQLAQRENRWMADINHQVSKTLVTAYGPHTLFVLEDLTNVTFNTDDLPKSLRNSHRSWSFFQLESFLTYKAQAIQSTIVKVSPAYTSQRCPKCGLIERANRHHETHEYHCRQCQYRSNDDRLGAMNIALLGQKWLSGVRNPKIKKITTTG

SEQ ID NO: 4973 - protein, 406 aa, unidentified
MTVLGRTLKLRLYPNTIQAQQILAMSHEYQRLANLTSQWVFDNDFPLSPLKINHALYQLFRQTSPLNSQMIQSVFRTVVARYRTVLAQMKQHPYRYQDENGKWVQTPKDLTWLFKPIHFSRPQADLVRNSNYSFVNDSTEISLTTLEKRTKMSFTIKGFEQYFQNGWKLGTAKLIHSQGKWALHIGITKEVADFTVGLQAQVVGIDRGLRFLATTYDRLGKTLFFSGQKILLKRKKFLENRRRLQSKSTRSAKKRLQQLDQRENRWMTDVNHQLSKTLVAAYGPETVFVLEDLTNVTFNTDDLPKSLRNSHRSWSFFQLELFLTYKAQAIQSTVVKVSPAYTSQRCPKCGLIERANRHHEIHEYHCRQCQYRSNDDRLGAMNIALLGQKWLSGVRNPKIKKITTTG

SEQ ID NO: 4974 - protein, 406 aa, unidentified
MTVLGRTLKLRLYPNTIQAKQLLAMSREYQRLANLTSQWIFDHDFPLSPLKINHALYQLFRQTSPLNSQMIQSVFRTVVARYKTVLSQMKQHAYRYQDEHGKWVETPKDLTWLYKPIHFSRPQADLVRNSNYSFVNDSTKISLTTLGKRTKMSFTIKGFEQYFQNGWKLGTAKLIHSQGKWALHIGITKEVADFTVGKQTQVVGIDRGLRFLATTYDRLGKTLFFSGQKILLKRKKFLENRRRLQSKGTKSAKKKLKQLAQRENRWMADINHQVSKTLVAAYGSHTLFVLEDLTNVTFNTDDLPRSLRNSHRSWSFFQLESFLTYKAQAIQSTVAKVSPAYTSQRCPKCGLIEKANRHHEIHEYHCRQCQYRSNDDRLGAMNIALLGQEWLSGDKNPKIKRITTTG

SEQ ID NO: 4975 - protein, 406 aa, unidentified
MTVLGRTLKLRLYPNTIQAQQLLAMSHEYQRLANLTSQWVFDHDFPLSPLKINHGLYQIFRQTSPLNSQMIQSVFRTVVARYRTVLAQMKQHPYHYQDENGKWVQMPKDLTWLFKPIHFSRPQADLVRNSNYSFVNDSTKISLTTLGKRTKMSFTIKGFEQYFQNGWKLGTARLVHSQGKWALHIGITKEVADFAVEQQAQIVGIDRGLRFLATTYDRQGKTLFFSGQKILLKRKKFLENRRRLQSKGTKSAKKKLKQLAQRENRWMADVNHQVSKTLVAAYGPHTLFVLEDLTNITFNTDDLPKSLRNSHRSWSFFQLESFLIYKAQAMQSTVVKVSPTYTSQRCPKCGLIERANRHHETHEYHCRQCQYRSNDDRLGAMNIALLGQKWLSGVRNPKIKKITTTG

SEQ ID NO: 4976 - protein, 406 aa, unidentified
MTVLGRTLKLRLYPNTIQATQLSAMSQEYQRLANLTSQWVFDHDFPLSPLKINHALYQSFRRTSPLNSQMIQSVFRTVVARYKTVLAQMKQHPYRYQDEHGKWVQTSEDLTWLFKPIHFSRPQADLVRNSNYSFVNDSTEVSLTTLEKRIKMSFTIKGFEQYFQNGWKLGTARLVHSQGKWTLHIGITKKVADFAVGKQNQVVGIDRGLCFLATTYDRLGKTLFFSGQKILLKRKKFLENRRRLQSKGTKSAKKKLKQLARRENRWMTDVNHRLSKTLVAAYGPHTLFVLEDLTNITFNTDDLPKSLRNSHRSWSFFQLESFLTYKAQAIQSTVVKVSPAYTSQRCPKCGLIEKANRHHEIHEYHCHQCQYRSNDDRLGAMNIALLGQEWLSGDKNQKIKRITTTG

SEQ ID NO: 4977 - protein, 406 aa, unidentified
MTTLGRTLKIRLYPVANQATQLLEMSREYQRLANLVSQWVFDHDFPLSSLKINHALYKVLRRESPLNSQMIQSVFRTVVARYKTVLEQMKHHPYRYQDDDKNWVRVTKDLTWLFKPLHFSRPQADLVRQSNYSFVNSLTEISLTTLGKRTKMPFTIKGFKQYFQSGWKMGTAKLVHSRGKWYLHIGITKEVADFDSTVSSRVVGIDRGLRFLATTFDQQGKTRFFDGEKVLLKRHKFQKIRTELQHRGTKSAKKRLKQLQQRENRWMTDINHQLSKTLVTLYGPQTLFVLEDLTDVTFNTDDLPKSVRGSHRSWAFYQLETFLTYKAQAIQSQVLKVNAAFTSQRCPKCGLVEKNNRRHDIHEYHCQQCQYRSNDDRLGAMNIAMLGQEWLDGVKHPKIRKTTATG

SEQ ID NO: 4978 - protein, 400 aa, unidentified
MQRLQAFKFELMPNGEQQRKMRRFAGACRFVFNKALALQKENYKAGGKFIGYVAMAKHLTAWRNGTETPWLKDSPVHPLQHALKDLERAYKHFFAKRAAFPRFKKKGHSNSFRYPDSKQIKLDQANNRVFLPKLGWLRYRNSREVLGEVRNATVSQNAGKWFVSIQTAREVEQPVPQATSAIGIDVGIARFATFSDGSFLAPLNSFKRHEAKLRRAQRAMSRKVKFGNNWKKAKARIQRIHARIGNARRDYLHKATTTISKNHAMVCIEDLQVSNMSRSAAGSADAPGKNVRAKSGLNKAILDQGWFEFRRQLDYKLTWHGGWLIAVPSANTSRTCPICKYVSTDNRQTQAAFRCVGCGYENHADVVGAINILARGHRVAACGEPVQSGRSVKQEPTEAI

SEQ ID NO: 4979 - protein, 413 aa, unidentified
MKLCFKFKPQINSKQLEIIEELSYHTTKLYNIINYDLRENGFKNYYDIEKQYKSNWHCDFLHSHTRQQMFKVLEQNWKSYFASIKDFRVNPSKYKGLPRPPKFKNTDKNKNEIIFTNLAIRYSDGILKLSLSKAIKSLFNVESLNFEVSKKLQNIINWYELQQARFNYDKIQKVWHLIIIYNKNEVETTSNNVMSIDIGLDNLATITFKDGINQYIYCGKKLKSVNSYINKRISYLQSIEMKKVGSDKFKNTKEINKLRRYRNNYINDYLHKVSKNIIDKAIENNVSRIVIGKLKGVKQNMNFNKSFVQIPIQRLVELITYKAKLHGISIKLQEESYTSGCSAIDLEPITKKYYDKSRRIARGLFQSTYGIVNADINGSLNILRKAEKCIPDLVNTMRDKGNWTHPQRIRVAC

SEQ ID NO: 4980 - protein, 405 aa, unidentified
MKRLQAFKYELQPNGEQARSMRRFAGSCRFVFNKALAMQKAIYEGGEKKLGYAGLCKELTTWKTQPETAWLKETHSQVLQQSLKDLERAYKNFFDKRADFPRFKKKGMGDSFRYPQGCKLDQSNSRVFLPKLGWLKYRNSRDVLGTVSNITVSANGGKWFVSIQTEREVEQPVHPATSIVGIDVGITRFATLSDGSHIEPLNTFRKHQQRLARYQRAMSRKTKFSSNWKKAKARVQKIHTRIANVRKDFLHKTTTTISKNHAIVCIEDLQVRNMSKSAAGSSDSPGRNVKAKSGLNKSILDQGWFEFRRQLEYKQVWLGGDVLAVPARNTSRTCPACGHVSADNRQTQAKFACVDCGYENNADVVGAINVLERGHRLLACGELAQSGRSVKQEPAEATTQGLALV

SEQ ID NO: 4981 - protein, 405 aa, unidentified
MKRLQAFKYELQPNGEQARSMRRFAGSCRFVFNKALAMQKAIYEGGEKKVGYAGLCKELTTWKTQPETAWLKETHSQVLQQSLKDLERAYKNFFDKRADFPRFKKKGMGDSFRYPQGCKLDQSNSRVFLPKLGWLKYRNSRDVLGTVSNITVSANGGKWFVSIQTEREVEQPVHPATSIVGIDVGITRFATLSDGSHIEPLNTFKKHQQRLARYQRAMSRKTKFSSNWKKAKARVQKIHTRIANVRKDFLHKTTTTISKNHAIVCIEDLQVRNMSKSAAGSSDSPGRNVKAKSGLNKSILDQGWFEFRRQLEYKQVWLGGDVLAVPARNTSRTCPACGHVSADNRQTQAKFACVDCGYENNADVVGAINVLERGHRLLACGELAQSGRSVKQEPAEATTQGLALV

SEQ ID NO: 4982 - protein, 500 aa, unidentified
MYSAYKIQIHSNHELFEYCDSLCFKAKNLYNITNYYVRQVYTALKVEKKNENQLQVLMDIETYLPIMNEIRQKHYEKEMVKPKKVDKNGKEIEPKLKLFKMPTKDHSFIGYSFVDALFKVMKQIDYTSMPSQSNQQTMKKVFDDWKSFFEASKKYKINPSCFSGKPKIPKYKSKTGRTTCYLTNQITAIKEGNVLKLPGTSFQLKLGKVALSEGKLQQIRIVPSYGQYVVEVVFKAEQQEMAIVRTAEQINKFIFEPKRVMGIDLGVDNLATIVDNLGLKPLLIKGTWLKSINQYYNKLRANYMSIIRNGKSPKEGVFTTNRLVALDRKRNNRVMDFLHKASVKVVTIALERDIDTIIIGKNSGWKLDVNMRKSAKQTFIQIPYTTFIDMIRYKAERKGIQVIIRDESYTSKSCFLTKDPIPTFGEEHQTIFSGQRVKRAFYKIIGSKIQIHADVNGAFNIVRKHVFGAFEGLDRKHFLQSPKKIIIVKTKKKAKLKASA

SEQ ID NO: 4983 - protein, 450 aa, unidentified
MTSGQRRRCFGLLRSAGDVWACVLEVNAWRRRRHDAPLVGYQELCRELAASGPGTFADLDSTGARSVLRRFSDAWFAAAKRRTAGDLSARFPRRRRALVPVRWYHGTFTLDGRRVRIPTAKGGAPLWVRLAREVPYPAEQVRSITLLREGGRLFLDVTAEVPVAVYPPGEQPDPGRVAGVDLGIIHPYAVAGPDGEGLLVSGRAIRAEHRMHLADTKGRRRAVARRAPKPGQKGSRRWRQYRRRARLVQGRHRRRVRQAQHEAARTVVSWAVRQRVGVLHVGDPRGVLDIPAGRRHNLRLRQWQIGRLLQVLTDKATLAGITVRLVDERGTSSTCPACHRRVPKPRGRTLSCPHCAFSGHRDLVAAASIATRVPGGGSTTPTAVVLPEVVTHRRAGRHLPGAGRSRRDPRRPPGAARGSVGPRRPAPPPGGESLAHTARIHDTHRKPGER

SEQ ID NO: 4984 - protein, 450 aa, unidentified
MTSGQRRRCFGLLRSAGDVWACVLEVNAWRRRRHDAPLVGYQELCRELAASGPGTFADLDSVGARSVLRRFSDAWFAAAKRRTAGDLSARFPRRRRALVPVRWYHGTFTLDGLRVRIPTAKGGAPLWVRLAREVPYPAEQVRSITLLREGGRLFLDVTAEVPVAVYPPGEQPDPGRVAGVDLGIIHPYAVAGPDGEGLLVSGRAIRAEHRMHLADTKGRRRAVARRAPKPGQKGSRRWRQYRRRARLVQGRHRRRVRQAQHEAARTVVSWAVRQRVGVLHVGDPRGVLDIPAGRRHNLRLRQWQIGRLLQVLTDKATLAGITVRLVDERGTSSTCPACHRRVPKPRGRTLSCPHCAFSGHRDLVAAASIATRVPGGGSTTPAAVVLPEVVTHRRAGRHLPGAGRSRRDPRRPPGAARGSVGPRRPAPPPGGESLAHTARIHDTHRKPGER

SEQ ID NO: 4985 - protein, 405 aa, unidentified
MERLQAFKYELMPDGGQQRQMRRFAGACRFVYNKALALQKDNYEAGGKFIGYVPMAKRLTAWRNGSETPWLKDAPTHPLQHALKDLDRAYKNFFAKRAAFPRFKKKGRSDRFRYPDPKQIKLDQTNSRIFLPKLGWLRYRNSRDVLGAVRNATVSLSGGKWFVSIQTAREVDTPIPRATHAVGIDMGIARFATFSDGTHLAPLNSFKTHEARLRHAQRAMSRKIKFSSNWKKAKSRIQRIHARIANARRDYLHKATTTISQNHAMVCIEDLQVRNMSKSAAGNIEQPGNNVRAKSGLNNAILDQGWFEFRRQLDYKLRWTGGYVIAVPPHNTSRTCPCCGHASVENRTTQARFTCVACGYENHADVAGAINVLERGQRLFACGGRVQSGHPAKQEPAEATAQLIA

SEQ ID NO: 4986 - protein, 437 aa, unidentified
MWACVLELNAWRRQRRDKPLASYQELCRELAASGPGTFGELDSTGARSVLRRFSDAWFAAAKRRRDGDATARFPRRRRGLVPVRWYHGTFTLDPGGRRVRLPTARGGRPLWLRLARSLPYPAEQVRSVTLLAEGGRLFLDVTAEVPVTVYEPGCGPDPARIAGVDLGVIHPYAVAGPDGQALLVSGRAIRGEHRMHLADTKQRRRAVAGRAPTRGQRGSRRWRKYRRRSRAVEGRHGRRVRQAQHEAAKTVITWAVQQRVGTLHMGDPRGVLQLAAGRRHNLRLRQWQVGQLIRILVDKATLAGITVHLVDERGTSSTCPGCSRRIPKPSGRVLTCPHCALTGHRDLVAAASIATRTPGGGPTTPAGSSVVLPGVVTHRRAGRHLPGAGRSRRDPRRPPAPRAARGSVGQRWPAPPHSGGESLAHTGEDPQHPPETR

SEQ ID NO: 4987 - protein, 542 aa, unidentified
MRTWRMTFNPKKQKNSVFCQYFLTNTTDARRMYNTANFYIRNTMTGIKKSPELRTPNEVEVLHDVFTGIQKANKARNIKYQKDLEKYNKGLSEKQPKEPKYFPYPTTKEWFLTYNVLDAVFKYTHNEVYYSMNSQLNQNAIRKVAAAWKGYFKTLKDYRKNPSKYKERPNMPGYLKNPQYVAWFSNQTAKYSVEKDGRAYLRFVHNETLFCIGKASLYTGLRYVKTEIKPQHGCYLILVTFDDGEELPKAPEKPKRIIGIDPGVDNLAAVVNNFGVHSFLIRGGAVKAANQWFNKKRASLLSAVTVGSDSRHSVKNSHFLSALSRKRDDLFRDIFYRAAWYICRFAVRHHTDVIVIGHNKDQKQKIRLGKQNNQSFVSIPFVRFEQILTNTAAKCGIPVIVQEESYTSKASVLDGDVIPTYGIDDDHAYFSGKRVKRGLYRSADGTFLNADVNGAANVIRKKYPDAFDGQNLKYLCKTTNVVKFTDLYPGAKSTCQEHYNGKRHESSPASKASHRYRKDTRLKYRILFGKSKYVYTSAKKSA

SEQ ID NO: 4988 - protein, 542 aa, unidentified
MRTWRMTFNPKKQKDSVFCQYFLTNTTDARRMYNTANFYIRNTMTGIKKSPELRTPNEVEVLHDVFTGIQKANKAKDSKYQKDLEKYNKGLLDKHPKRPKHFPYPTTKEWFLTYNVLDAVFKYTNNEVYYSMNSQLNQNAIRKIAVAWKGYFKILKDYQKNPSKYKERPNMPGYLRNSQYVAWFSNQTAKYSVEKDGRAYLRFTKNKDLFCIGKASLYIGLRYVKTEIKPQHGCYLILVTFDDGIELPKVPEKPKRVIGIDPGVDNLAAVVNNFGVHPFLIKGGAVKAANQRFNKKRASLFSAVTTGSDSRHSVKNSHSLSALSRKRDDLLRDIFYRAAWYICRFAVRHQVDVIVIGHNKDQKQEINLGKQNNQSFVSIPFVRFEQILTNTAAKCGIPVVVQEESYTSKASVLDGDVIPTYGIDDDHVHFSGKRVKRGLYRSADGTFLNADVNGAANVIRKKYPDAFDGQDLKYLWETTDVVKFTDLYPGAKSTCQEHYNGKRHESSPASKAIHRYRKDTRLKYRILFGKSKYVHTSAKKSA

SEQ ID NO: 4989 - protein, 561 aa, unidentified
MRTFKMIIDPTKNKKDAAFCQYFKTNTADSKCMYNTANFYIRNTMTGLKKSPEERTPLETEVLHYVFTGIQKANEIIGQKNMKKKFAELKLAEVGGMYSAVTAFSIVSQEPFQYPTAKKWFLSYGTLDAIFKFTDNPVYRRMNSQVNQNAIRKAVAAWQGYFESLKAYKKNPAGFTGKPKIPGYKQDKEYIAWFSKQAAKLKEEDGRYYIQFVNNPDRFGIGKASLYDDLKYVKTEVKPMYGKYYILITFDDKIAEVEVPENPKRILGLDPGVNNFLGVANNFGGVPFVINGRAIKSANQRFNKKRTKLISSVTKGSDSKSSVKYSKQLNILSQRRESFQRDYFYKCAWYICRYAKAADVDVIVMGHNDGQKQEIDLTDNVNQNFVSIPYTKFITILKTVASKCGIAVVIREESYTSQASLLDMDDIPTYKKGENKKYAFSGKRIHRGLYRSKNGTLLNADINGAANIIRKEYQNAFDGIKNFTYLCVTTISIGYKDLYKNAKACADRPKQYKYHKSGRCTFVRHMERSHKKCEYCKLWGKEKFVWRPDKNKQNTQQKKAA

SEQ ID NO: 4990 - protein, 400 aa, unidentified
MQRLQAFKFELVPTGEQQRDMRRFAGSCRFVYNKALALQRDNYAAGGKFISYVAMAKHLTAWRNGSETAWLKDSPVHPLQHALKDLERAYKHFFGKRAAFPRFKKKGKSDRFRYPDPKQIKLDQGNSRIFLPKLGWLRYRNSRRVLGELRNATVSQSAGKWFVSIQTQREVDRPVPQATSAVGIDVGIARFATMSDGTFLAPLNSFKRHEARLRRAQRAMSRKVKFSSNWKKAKARIQRIHSHIGNARRDYLHKATTTISNNHAMVCIEDLQVRNMSKSAAGNTENPGKNVRAKSGLNKSILDQGWFEFRRQLDYKLAWNGGWLIAVPPANTSRTCPACACVSAENRLTQARFACIECGFKENADVVGAINVLARGHRVAACGEPAQSGRSVKQEPAEAI

SEQ ID NO: 4991 - protein, 274 aa, unidentified
MQRLQAFKFELTPNGEQQRKMRRFAGACRFVFNKALALQKENHEAGGKFIGYVAMAKHLTAWRNGTETPWLKDAPVHPLQHALKDLERAYKNFFAKRAAFPRFKKKGHSDSFRYPDSKQIKLDQVNNRVFLPKLGWLRYRNSRDVLGEVRNATVSRNAGKWFVSIQTGREVAQPAPQATSAIGIDLGIARFATLSDGSFLAPLNSFKRHEDRLRKAQQAMSRKSKFSSNWKKAKARVQRIHSRIGNARRDYLHKATTTISQNHAMVCIEDLQVR

SEQ ID NO: 4992 - protein, 400 aa, unidentified
MQRLQAFKFELTPNGEQQRKMRRFAGACRFVFNKALALQKENHEAGGKFIGYVAMAKHLTAWRNGTETPWLKDAPVHPLQHALKDLERAYKNFFAKRAAFPRFKKKGHSDSFRYPDSKQIKLDQVNNRVFLPKLGWLRYRNSRDVLGEVRNATVSRNAGKWFVSIQTGREVAQPVPQATSAIGIDLGIARFATLSDGSFLAPLNSFKRHEARLRRAQRAMSRKVKFSNNWKKAKARIQRIHAGIGNARRDYLHKATATISQNHAMVCIEDLQVRNMSKTVAGSPDAPGKNVRAKSGLNKAILDQGWFEFRRQLDYKLAWNGGWLIAVPPANTSRTCPVCEYASAENRQTQAAFRCVACGHEEHADVVGAINILARGHRVAACGEPVQSGRSVKQEPAEAL

SEQ ID NO: 4993 - protein, 400 aa, unidentified
MQRLQAFKFELTPNGEQQRKMRRFAGACRFVFNKALALQKENHEAGGKFIGYVAMAKHLTAWRNGTETPWLKDAPVHPLQHALKDLERAYKNFFAKRAAFPCFKKKGHSDSFRYPDSKQIKLDQVNNRVFLPKLGWLRYRNSRDVLGEVRNASVSRNAGKWFVSIQTGREVAQPVPQATSAIGIDLGIARFATLSDGSFLAPLNSFKRHEARLRRAQRAMSRKVKFSNNWKKAKARIQRIHAGIGNARRDYLHKATTTISQNHAMVCIEDLQVRNMSKTVAGSPDAPGKNVRAKCGLNKAILDQGWFEFRRQLDYKLAWNGGWLIAVPPANTSRTCPVCEYASAENRQTQAAFRCVACGHEEHADVVGAINILARGHRVAACGEPVQSGRSVKQEPAEAL

SEQ ID NO: 4994 - protein, 400 aa, unidentified
MQRLQAFKFELMPTGEQQRDMRRFAGSCRFVYNKALALQRDNYAAGGKFISYVAMAKHLTAWRNGSETAWLKDSPVHPLQHALKDLERAYKHFFGKRAAFPRFKKKGKSDRFRYPDPKQIKLDQGNSRIFLPKLGWLRYRNSRRVLGELRNATVSRSAGKWFVSIQTQREVDRPVPQATSAVGIDVGIARFATMSDGTFLAPLNSFKRHEARLRRAQRAMSRKVKFSSNWKKAKARIQRIHSRIGNARRDYLHKATTTISNNHAMVCIEDLQVRNMSKSAAGNTENPGKNVRAKSGLNKSILDQGWFEFRRQLDYKLAWNGGWLIAVPPANTSRTCPACACVSAENRLTQARFACIECGFEENADVVGAINVLARGHRVAACGEPAQSGRSVKQEPAEAI

SEQ ID NO: 4995 - protein, 426 aa, unidentified
MAKQVVTRTYTASIRNQSRVSDDLDALGFAASKLWNVGRWTCSRIWGEIGHIPNHTELTAYLKTHERYDDLHSQSSQRVLQELAEAFRGWYGKRRNGDMRANPPGYRKHGDEHPRSTVTFKAAGFKLDTQYNRVRLSQGENLKNYWSDFILCTFHTRPDVDLSTVETVQQVKAVWTGDEWELRFVCKVEIEASESPGEKTVGVDLGIKNFAALAYEDGHSELYPLNCLKQDDYYFSKRIARCDDSNSEQVTRLNHKKSARRTHYFHTLSKHIVERCVEEGVGTIVVGNLSDIRVDEETNEAKNWGRHGNLDLHSWAFDRFRKLLTYKSETEDITVEQESERDTSKSCSCCGRKRDGNRVERGLYVCDTCGTVANADVNGAENIRQKVSLSSPNLSVNRSNGWLAQPSTFLFDKETGAFAPEERVRS

SEQ ID NO: 4996 - protein, 514 aa, unidentified
MRTWKINIQPTKDAVLCDYFAENTTAAKCMYNVANFYIRNTMTGIRKSPEERTACETEVLHYIFTGIQKANHHARENYEKKLKKYQDMHTKKGDKLAADLKCKVFPYPTREKWFLSYGVLDAIFKHTDNPTYRRMNSHVNQNAIKKAVRSWKSYFKAVRDYAVHPEKYKARPRIPGYKHAAEMTAAYTSQTAVFSCQDGHAYLKFVNHKQPVRIGKESLYADMTYAKTEVKPQYGGYTILVTFKEDIVLPEVPKQPKRILGIDVGVDNLAAVANNFGDMPFLIKGGALKSMNQKFNKQRAKLLSEVTKGSDSTHSRKETKRLQALSRKRDTFLRDFFYKTAWYLVRYAKKHQVDVIVIGHNEDQKQNIRIGKQNNQNFVSIPFCQFIKILRNTAAKAGIPVADREESYTSKASLLDLDAIPTYRKGNTQAYTFSGKRVHRGLYKTNRGCIINADINGAGNILRKEYPYAFDGQDMSYLYKTTKVVSYTDIYAGAKSVCKEKYNQKSHEPGWEAG

SEQ ID NO: 4997 - protein, 485 aa, unidentified
MENENKVGSYSTQQIWIKKGHRMYAYFQSMCENSKNLYNTTNFYIRQVYTALTSKKELHPLQKEVMDTLAAFIDPMNKVQTDAYEKRLAKEQQKPAEKRKEVTCNLFSLPDCSNPYVHYNFLDALFKLMKQNDYQSLPIQSSQSTMKTVFKNWKSFYVSLKDWKVNPAKYTGKPNIPRYSRATMKEIEFTNQDCVIKENKFLKFPKTKEKLNIGKLGSTSNKLKSVRVIPRYDQFVVELVFEKPELEEREKCVSSRFMSIDLGIDNLATITTNTGMTPVLLKGKAVKSINQYYNKMRAYYYSILRQGKDPKEGLFSSKRLIHLDAIRHRKLKDLFHKFSFFIKELAAFENIDTIIIGQNEGWKQNSNIGKVNNQKFVQIPYSLLISMIRYKAEEISIKVFVTEESYTSKASFLDGDTIPKYREKGDQTFSGHRISRGLYRTKSRTILNADVNGSANIMRKYTEKGTIPFRIEDVEVHNPLTYRIT

SEQ ID NO: 4998 - protein, 463 aa, unidentified
MVLRTARVGLRLTRGQRNRCFGLLRAAGDVWACILEINSWRRRRGEPPVAGYQQLCRLLTESGPGTFAELDTAGARSVLRRYSDAWFCAAARRKAGHTDVRFPRRRRALMPIRWYHGTFALDGRRLRLPTAAGCPPLWVRLDRLAPYPCETIRSVTLLFDAGRLWIDITAELPVATYPAGQQPDPDRIAGVDLGIIHPYAVSTLDGAGLLVSGRAIRAEHRMHLADTKNRRKAVAGRAPKPGQRGSRRWRKTRRRARLVEARHRRRIRQAQHEAATSVIDWAVKQRVGTLSVGDPRGVLGLPAGRRHNLRLRQWQIGRSLAILHDKAALAGIRVHLVDERGTSSTCPNCRTRITKPAGRTMRCRTCLFAGHRDLAAAFTIATRTPGGVITTPAGMPAGVVTHRRAGRHLPGAGRSRRDPRRPAAPGSVGRLRPAPPPSVGSRSSIPPGMDEDPQHTTGKPGER

SEQ ID NO: 4999 - protein, 494 aa, unidentified
MADAKATYRTYQVWVKPGHRLFGYLDEACQNAKNLYNTTNFYIRQVFTAWGRQEDLQPLQQQVMDMLAAQIGAMNERRSEKNRLHPFELPSPDKPFVSYAFLDALFKVMEQTDYRALPAQSSQGIMKVVFQNWKAFFASMKDYRKHPEKYTGKPNIPGYARGTAKEIVFSNQDCVIKGGRFLKLPKTKLQLNIGKLGRTEGQLMQVRVVPSHGRYVVELVFACPVKKEEDVNHSDLLMDENAPHLLMAVNHSDLLMAIDLGVDNLATIVTTSGSKPMIMKGRIIKAINQYYNKMKAYYTGILRQGKEPRKGAYTSKRLERLHLKRHRRIKDLFHKASHHIIKLAVEQQIGTIVIGYNDGWKQESAMGRRNNQSFCHIPHQILVDMIQYKAEEQGITVILTEEAYTSKASFLDQDSLPCYDEGRTVTFTGKRICRGLYRSPRGWIHADVNGAANIMRKVFPNVSLYGANGIEGLDGNQTINVSTPLVLSILKKSG

SEQ ID NO: 5000 - protein, 417 aa, unidentified
MANQVTRTYVASIHNHQQVCEDLDSLGFAASKLWNVARWTCDRIWDETGTIPDHGALKAYLKNNERYADLNAQSSQAILEELAEAFDSWYTLRGNGDKKANPPGYRKHGDDHPRSTVTFKEDGFKHDPDHDRIRLSKGQNLKDGRQDFILCEYAVDPDVTVQNVQQVRAVWTGTDWELHIVCNVERDDPDPPGDRVAGIDLGICNFAAVAVGDDALLYPGGALKEDDYYFQKQRAKCDDSSSRKAQRLDRKRGERRTHFFHAVSKDIVAECAARNVGTIVVGDLTGIRENTDWGDHGNLDLHGWAFDNFTQMLEYKAAEYGISVERVDERGTSKSCGSCGTIDDSQRVERGLYVCDECGLVANADVNGAENIRQKVLPNLACDGGDRDNGWMAQPAVRLFDTSTGRIAPQEQVTREP

SEQ ID NO: 5001 - protein, 422 aa, unidentified
MLKTTRTYRAKIVNHQQVSDDLDNCGHSASKLWNVARYHIQQEWDSTGEIPSEADLKRELKDHERYSDLHSQSSQRVLEELAESFNGWFKKRKNGDTDANPPGYRKRGDKHPRSTVTRKQNGIKHDSKHNQLRLSKGFNLKNHRSDFILAGYETRPDVTVENIQQVRAVWNGDRWELHLVCKVEIPVEDAPGDDTAGIDLGISNYLTIAYDDGDAELYPGNVLKQDKHYFTRDEYDTEGENGPSRRALRARQKLSRRKDHFLHALAKHIVEQCIGHEVGRIAIGDLSKIRVDENGESRNWGRGGNKKLHGWEFDRFTTLLEYKAEEHGILVDRTSERDTSKTCSCCGRKRDANRVERGLYVCESCGATMNADVNGAVNIRRKITQNPPTEDMSNGRLARPVAYLFNQTSGRFAPSEQVGCES

SEQ ID NO: 5002 - protein, 422 aa, unidentified
MLETTRTYRATIVNHSQVSDDLDDCGHSASKLWNVARYHIQQEWNDTGEIPSEADLKRELKDHERYSDLHSQSSQRVLEELAESFTGWFKKRKNGDTDANPPGYRKRGDNHPRSTVTWKQHGIKHDTSKNRLRLSKGFNLKSHRSDFILCEYETRPDVTVENIQQVRAVWNGDRWELHLVCKVEIPVEDAPGDNTAGIDLGIKNYLAIAYDDGEAELYSGNVLKQDKHYFTRDEYDTEGENGPSRRALRARQKLSRRKDHFLHALSKHIVEQCIDHEVGRIAVGDLSDIREDENGDSRNWGTRRNKKLHGWEFDRFTRLLEYKAEEHGILVDRKSERDTSKTCSCCGRKREANRVERGLYVCESCGVTMNADVNGAVNIRRKITQNPPTEDMSNGRLARPVAYLFTQTSGRFAPSEQAGCKP

SEQ ID NO: 5003 - protein, 478 aa, unidentified
MAGYKTMQIWVKKGHRMYGYFEEMCQNAKNMHHTTNFYIRQVYTALTQEKALQPLQKEVLDNIRIHLPEINANQLAAYRKKVVKEEAIPSDKRKEVTCFLFEEPTKEKPYINYNVIDALFKSMSQNDYRSLPVQSSQWVMKVVFQNWKSFYASLREYRNTPSKFKARPKIPGYSRSKEKEVTFSNQDCVIRDHKFLKFPKTKERLNIGKLGWIEGKLKQVRVIPKYGQYVVGIIFAVPPAQESRESKNRYLSIDLGIDNLATIVTNTGERPVLVKGKTIKSINQRFNQLKSHYTGILRQGKNTSQGSFTSKRLEKINNKRFNQLKDLFHKASYQIEKLALENDIDTFIIGHNKGWKDHSNMGKRNNQTFITIPHRLLVQMITYKVERHGIKVIMTEESYTSQASFLDYDDIPVYGEEMNNSFSGKRVKRGLYRSKNGTHMNADVNGAANIMKKVFRDAFKEPFACTETLLYPISVTLK

SEQ ID NO: 5004 - protein, 479 aa, unidentified
MAAYQTMQIWVKKSHRMHPYFQNMCQNAKNMHNTTNFYIRQVFTGLKQEKELQPLQKEVLESLQTHLPAINANQLQAYRRRSTKEQEKAKSEQKEIKCHLFEMPSKDKPYISYPFLNALFKSMKQIDYQSLPIQSSQGIMRTVFQNWKAFYGNLREYKKNPTKWKTRPNIPGYCRSKEKEIIFSNQDCVVKDKKFLKFPKTKLRLNIGKLGYSEGKLKQVRVVPKYSHYVVELVFQVPIEVEKKESKNRLLAVDLGMDNLATIVTNTGKRAVLVKGKNVKSVNQRFNQLKAYYTGILRQGKQVKEGTFTSNRLEKISHHRFLQIKDLFHKASFQIVKIALEENIDTLIIGQNKAWKQHAAMGKRNNQSFTSLPHSLLIQMIKYKAEEHGITVVLTEESYTSKASFLDNDDIPVYGQKNKNAVFSGKRIKRGLYLSKNRERINADVNGAANIMRKVFKDAFHRNFSNIEALRRPVTLVVR

SEQ ID NO: 5005 - protein, 422 aa, unidentified
MLETTRTYRAKIVNHQQVSDDLDDCGHSASKLWNAARYHAQQEWDNTGEIPSEADLKRELKDHERYSDLHSQSSQRVLEELAESFNGWFKKRKNGDTDANPPGYRKRGDNHPRSTVTWKQNGIKHDSKHNQLRLSKGFNLKNHRSDFILAEYETRPDVTVENIQQVRAVWNGDCWELHLVCKVEVPVEDAPGDNTAGIDLGIKNYLAIAYDDGDAELYPGNVLKQDKHYFTRDEYDTEGENGPSRRALRARQKLSRRKDHFLHALAKHIVEQCIDHEVGRIAVGDLSKIREDENGDARNWGKRGNKKLHGWEFDRFTTLLEYKAEEHGILVDRVSERDTSKTCSCCGRKRDANRVERGLYVCESCGVAMNADVNGAVNIRRKITQNPPTEDMSNGRLARPAVHLFNQTSGRFAPSEQVSCEP

SEQ ID NO: 5006 - protein, 401 aa, unidentified
MSEYTVRKLKIGNTQQMSELALAAGELYSRAVVGFWRTVRNKGLWLKPSSMMRWHNSDNLHAHSADAVVQSFYASLKSWRARRKADPNAHPPRKRRRFFKVQWKSSAIKVKNGKLHLSNGKGNAPLIIDWNWETPKLVEMGWDGKQYEIRACYTVVPVQPVDSGAVAGIDLGEIHLAVAHDGEQTFILNGRLLRSKRQYQNKLKAKLASLVDTKKRGSKNRKRLVKSKQRQLAKVKNQIKDILHKQTSKLVSTLKSRGVQTLAVGDVRDIRQRIDFGTKANQKLHQWSHGETRTFLTYKAQRMGMKVEIQCEKYTSQTCPSCGQRHKPKNRAYKCKCGFEFHRDGVGSINIRRKYLGCFDVPVVGVMAAPTGLRFRPHSKCSSVCLVLALQAMHSERIPLL

SEQ ID NO: 5007 - protein, 471 aa, unidentified
MTDSKSMYRTHQVWIKPGHRLFTYLDLACQNAKNLYNTTNFYIRQVLTSFGQKESLQPLQQQVMILLAEHIDAMNERLREKNRSRPFKLPTEEKPFVSYNFLDALFKVIDQSDYRALPTQSSQGIMKIAFQNWVSFFASMKDYRKHPRKYSGKPRIPGYVRSKVKEVVFSNQDCVIKEKKFLKLPKTKLQLNIGKLGCTGGQLKQVRVIPRYGQYIVELVFAYPEVKKEAAKEYALAIDLGVENLATIVTTTGSKPMLVKGKIIKAINQYYNKMKAHYTGILRQGKKPSEGVHTSRRLERLHLKRHRRIKDLFHKVSRHIVQLAVEQQIGTIVIGHNDGWKQASAIGRRNNQSFCHIPHQMLIGMIQYKGAEQGITVTLTEEAYTSKASFLDQDPLPRYDEEGEWIFTGKRIHRGLYASTRGLIHADVNGAANILRKVFPYVSTQGTDGIEGLDGYQTINVSTPLVLSILK

SEQ ID NO: 5008 - protein, 422 aa, unidentified
MLETTRTYRAKIVNHQQVSDDLDGCGYSASKLWNVARYHSQQEWDDTGEIPSEADLKRELKDHERYSDLHSQSSQRVLEELAEAFNGWFKKRKNGDTDANPPGYRKRGDKHPRSTVTWKQNGIKHDSKHNQLRLSKGFNLKNHRSDFILAEYETRPDVTVENIQQVRAVWNGDRWELHLVCKVEISVEDAPGDNTAGIDLGISNYLAIAYDDGDAELYPGNVLKQDKHYFIRDEYDTEGENGPSRRALSARQKLSRRKDHFLHALAKHIVEQCIDHEVGRIAIGDLSKIREDENGDSRNWGKRGNKKLHGWEFDRFTTLLEYKAEEHGILVDRKSERDTSKTCSCCGRKRDASRVERGLYVCESCGATMNADVNGAVNIRRKITQNPPTGDMSNGRLARPVAYLFNQTSGRFAPSEQVGCES

SEQ ID NO: 5009 - protein, 489 aa, unidentified
MAKENPSNYKTLQIWIKKGHRMYSYFQECCHSAKNMYNTTNFYIRQVYTGLTQEKELQPLQKEVLANIHKNIGKMNDTQLLAYQKKLEKEKLKPKEEQKEITCNLFSEPNFEKPYVDYNFLDALFKAMIQNDYRALPTQCSQSIMKGVFQNWKSFFASLKDYKKNPNKYAGPPRIPKYIRSSEKEILYTNQDCIIKNDRFLKFPKTKLKLNIGKLGFTEGKLKQVRVIPKYNEYVVELVIDVPYEQQMIEENARYMSIDLGIDNLATIVTNTGMKPVLVKGKHVKSINQYYNKMKSHFTSILRNGKQTNEGPFTSKRIEKLHQKRYLKIKDVFHKVSHHIVKLAQEEEVCKIVIGQNKSWKQETNMGKRNNQSFCHIPHNLLIQMITYKANAVGIQVVVTEESYTSKASFLDNDFIPTYGENDQNTTFSGKRIERGIYRSANKTLINADVNAAANILRKVIPNAWTNGIEGLGVKQLANVLTPLTLIVR

SEQ ID NO: 5010 - protein, 601 aa, unidentified
MRTWKMIINPKKNKQDAAFCQYFKTNTADFKCMYNVANFYIRNTMTGIKKSPEERTHLETEVLHYVFTGIQKANEAIGQKRMKKKFEDLKLAQVGGMNCAVIAYSLASQEPFQYPTTKKWFLSYNTLDAIFKFTDNPVYKRMNSQVNQNAIRKVIAAWDGYFESLKQYRINPAGYTGKPKIPGYKNTEESTAWFSKQVAKLKEEDGKSYLQFVNQKERFCIGKASIYKGLQYVKTEIKPVYGRYCLLVTFDDKVKAVEPPADPERILGLDPGVNNFLGVANNFGAVPFVIKGGAVKSVNQRFNKRRSALLSALTKGSDSQHSVKYSEQLNTLSKKRDSFMRDYFYKCAWYICRYAQAAGVEVIVMGHNEGQKQEVTLGDKNNQHFVAIPYLKFITVLRTVAAKCGIAVVIREESYTSRASLLDMDDIPTYKQGDDTKYQFSGKRIHRGLYKSGNGTVMNADINGASNILRKEYLHAFDNMKDFTYLYETTLAIGYKDLYNNTKSMDERPDEYRYHDTASYARVYQTRAGFPAPTHASNYLKTDGQLKLAAVFPPVDKAGFGSKVRRKYRKRSRMEYCKLFGKSKFVWTADKRDKMQAEHAA

SEQ ID NO: 5011 - protein, 537 aa, unidentified
MRTWGYNVNKSSALWECFSRNTADTRCMRNTANFYIRNVMTGLRKSPEERTHAETEVLHEVFTGIQKANLLAVERYRKKLRKLRLAGGMKSAVVCSCLELKQFSYPTRTNWFLSYEVLDAVFKATEHPVYCRMDSQVNQNAIRKTVKAWKSYFKAVRDYAAHPEKYQAKPRIPGYIRTMGATAWWTNQTAKFLFRDGKAYLRFVNVKQPFCLGNASLFEGSTYVKTEVQPFHGHFRVLVTFDDHQKEAPVPEYPERILGVDIGLSNLLAAAGNFGDAPFVIGGGPVKALNQWFNKRKAELLSALTRGSDSKHSMKESHALDALSRKRDDTLNDIFYKCAWYLLRYAKANQVDVIVIGYNKTQKQGIGIGKQNNQAFVSVPYGKLRQCIRTVAAKLQVPVVEQEESYTSKASLLDLDQIPVYQSGKKNETGFSGSRIRRGLYRSADGTVLNADVNGAGNILRKRYPEAFDGRPLSYLWKTTKAVEIKDWYQKGGKKVSQKRHKASIASKVHHEQRKQTRREYLKLFGKSKKKRQPEAA

SEQ ID NO: 5012 - protein, 560 aa, unidentified
MRTWKMIISPKKNKQDAAFCQYFKTNTADFKCMYNVANFYIRNTMTGIKKSPEERTHLETEVLHYVFTGIQKANEAIGQKRMKKKFEDLKLAQVGGMNCAVIAYSLASQEPFQYPTTKKWFLSYNTLDAIFKFTDNPVYKRMNSQVNQNAIRKVIAAWEGYFESLKQYRINPAGYTGKPKIPGYKNTEESTAWFSKQVAKLKEEDGKSYLQFVNQKERFCIGKASIYKGLQYVKTEIKPVYGRYCLLVTFDDKVKAVEPPANPERILGLDPGVSNFLGVANNFGAVPFVIKGGAVKSVNQRFNKRRSTLLSALTKGNNSQRSVKYSEQLNTLSKKSDSFMRDYFYKCAWYICRYAQAAGVEVIVMGHNEGQKQEVTLGDKNNQHFVAIPYLKFITVLKTVAAKCGIAVVIREESYTSRASLLDMDDIPTYKQGDDTKYQFSGKRIHRGLYKSRNGTVMNADINGASNILRKEYLHAFDNMKDFTYLYETTLAIGYKDLYNNAKSMDERPDGYRYHKAGFGSKVRHKYRKRSRMEYCKLFGKSKFVWTADKRDKMQAEHAA

SEQ ID NO: 5013 - protein, 559 aa, unidentified
MRTWAMDFIPAKNKTEAAVCQYFKTNTTDFKCMYNTANFYIRNTMTGLKKSPEERTHLETEVLHYVFTGIQKANEDIGPKQMARILRDRRSAKAGGMQCAVRAYKLTLQEPFRYPTREKWFLSYGVLDAIFKFTDNPVYKRMNSQVNQNAIRKVVSAWTGYFELQKKYREDPLHNDKPKIPGYLKNTESTAWFSSQTAKLQEENGKYWLRFVNLKERVCIGSTSLYEGMKYVKTEIKPVYGYYRILVTFDDRVKEKEPPESPKRILGLDPGMGNFLAVANNFGGVPFVIRGGAIKSANQRFNKKRAALISSLTKGKDSTKSVKNSEQLRTLSRKRENFLRDYFYKCAWYICRYAQAAGVEVIVMGHNKGQKQEISLLDSTNQNFVSIPFTKFITALTSVAAKCGIAVVLTEESYTSQSSLLDMDEISFYSKGNTGGYTFSGRRVKRGLYRSGDGILINADINGAGNIIRKEYPDAFAGLKDLSYLYTTTMSIGYKDLYKEAKAPKKRPCRFHKEGRSSRVRYRERKERRTYYRKFWGDAKYIWKPEEKTGQEGSEDKAV

SEQ ID NO: 5014 - protein, 413 aa, unidentified
MKLSFKFKPNMSDKQLEIIEELSYHTTKLYNIINYDLREKGVKTYYDIEKMYKSNWHCDFLHSHTRQQMFKVLEQNWKSYFASIKGYKANPSKYKGVPRPPKFKNIDKNKNEIIFTNLAIRYDNGLLKLSLSKAIKSLFNVESLNFTVSKKLQGIINWNSLQQARFNYDKVQKCWYLIVIYNKEELEIDNTNVMAIDLGLDNLATLTFKDGLNQYIFCGKKLKSVNSYVNKRIAHLQSIEMKKYGSDKFKNTKQIIKLRKYRNNYISDYLHKVSKSIIDKAIENNVGKIVIGKLKGIKQGMDFNKTFVQVPIQRLAELITYKAKLHGIEIKLQEESYTSGCSALDLEDITKKNYDKSRRIVRGLFASSYGLINSDINGSLNILRKSEKCIPDLIKLKRDNGKLDSPKRIRVAC

SEQ ID NO: 5015 - protein, 489 aa, unidentified
MAKENPSNYKTLQIWIKKGHRMYSYFQECCHNAKNMYNTTNFYIRQVYTGLTQEKELQPLQKEVLANIHKNIGKMNDTQLLAYQKKLEKEKLKPKEEQKEITCNLFSEPNFEKPYVDYNFLDALFKAMIQNDYRALPTQCSQSIMKGVFQNWKSFFASLKDYKKNPNKYAGPPRIPKYIRSSEKEILYTNQDCIIKNDRFLKFPKTKLKLNIGKLGFTEGKLKQVRVIPKYNEYVVELVIDVPYEQQMIEENARYMSIDLGIDNLATIVTNTGMKPVLVKGKHVKSINQYYNKMKSHFTSILRNGKQTNEGPFTSKRIEKLHQKRYLKIKDVFHKVSHHIVKLAQEEEVCKIVIGQNKGWKQEINMGKRNNQSFCHIPHNLLIQMITYKANAVGIQVVVTEESYTSKASFLDNDFIPTYGENDQNTTFSGKRIKRGIYRSANKTLIHADVNAAANILRKVIPNAWTNGIEGLGVKQLANVLTPLTLIVR

SEQ ID NO: 5016 - protein, 484 aa, unidentified
MTKENPSNYKTLQIWIKKGHRMYSYFQECCHNAKNMYNTTNFYIRQVYTGLTQEKELQPLQKEVLDHIHKNIGKMNDTQRLAYQKKLEKEKLKPKEEQKEITCNLFSEPNFEKPYVDYNFLDALFKAMIQNDYRALPTQCSQSIMKGLFQNWKSFFASLKDYKKNPNKYAGPPRIPKYIRSSEKEILYTNQDCIIKNDRFLKFPKTKLQLNIGKLGFTEGKLKQVRVIPKYNEYVVELVIDVPSEQQMIEENARYMSIDLGIDNLATIVTNTGMKPVLVKGKHIKSINQYYNKMKSHFTSILRNGKQTNEGPFTSKRIEKLHQKRYLKIKDVFHKVSHHIVKLAQEEEVCKIVIGQNKSWKQETNMGKRNNQSFCHIPHNLLIQMITYKANAVGIQVVVTEESYTSKASFLDNDFIPTYGENDQNTTFSGKRIKRGIYRSANKTLIHADVNAAANILRKVIPNAWTNGIEGLGVKQLANVLTPL

SEQ ID NO: 5017 - protein, 488 aa, unidentified
MTKENPSNYKTLQIWIKKGHRMYSYFQECCHNAKNMYNTTNFYIRQVYTGLTQEKELQPLQKEVLEHIHKNIGKMNDTQRLAYQKKLEKEKVKPKEEQKEITCNLFSEPNFEKPYVDYNFLDALFKAMIQNDYRALPTQCSQSIMKGLFQNWKSFFASLKDYKKNPNKYAGPPRIPKYIRSSEKEILYTNQDCIIKNDRFLKFPKTKLQLNIGKLGFTEGKLKQVRVIPKYNEYVVELVIDVPSEQQMIEENARYMSIDLGIDNLATIVTNTGMKPVLVKGKHVKSINQYYNKMKSHFTSVLRNGKQTNEGPFTSKRIEKLHQKRYLKIKDVFHKVSHHIVKLAQEEVCKIVIGQNKSWKQETNMGKRNNQTFCHIPHSLLIQMITYKANAVGIQVVVTEESYTSKASFLDNDFIPTYGENDQNTTFSGKRIERGIYRSANKTLIHADVNAAANILRKVIPNAWTNGIEGLGVKQLANVLTPLTLIVR

SEQ ID NO: 5018 - protein, 419 aa, unidentified
MLLSKKIRLEVSEQDASTLEFMQGKCRALYNWWVMRLRNGEKWNIYEAKKSLQESKVYDPELVQVYGKLLQEVYYRLDGAMKAFYRRVKAGEKPGFPRVRPRHCFFTLCYPAMYIKIEGDKLILPTGGGGKHGAKVYPNIVARLTETPPEPFKEVAISRDARGNYSASFVRERKEKNCETGGTVAFDLGMKTLATGVNEQGRIYTIGGFKGGRWHNKQLDKIRSKRDQCKKKSRRYLHLSKVYKRVSQKKRNKQQDSLHKASHLIAHKLVERTVVVGDLSQRQMVMKEHRERNKHLNRAVYNEWGLYTFIQMLTYKCQLYGKDLHLLDERNTSKQCSGCGNLQAMPLWKRTYGCVECGLVMDRDENSAHNILARFFARQEPHAQARPECGVLHATQSGVEAKGASCEGHVQQLNLFEGA

SEQ ID NO: 5019 - protein, 400 aa, unidentified
MEYAAPFLQKLSIYAILVRMDRTIRIQLKPTHEQKQLLDETTRQFTQVFNAVCAYGWQHSEKNGVRLHHATYYKLRETYPRLNANVLIQARIKATEALKSTFDRKAKGRKAGQPQSRQCPIRYNERTSVLNWQTQEVCLSTVEGRILVPFQVPLYSSKYAGYQVTTADLCIRNGRYGLHVVVSVPEPDVPQSDEVIGVDLGLNRPAVTSNRHFLGSCHWKEVERRRFRIRRKLQSKGTKSAKRHLKKLSGRSLRFHRDCDHVLSKRIVEHATPGSTLVIENLTHIRSTSKIRKKTETSRRLHSWSFAQFHTFLSYKAQERGMQVVKIDPRHTSQTCSQCGHQHRSNRKSQSLFLCKNCGYCLNADLNAAYNIRNKHLASLGISLASGSLSDGLSSQPFVG

SEQ ID NO: 5020 - protein, 424 aa, unidentified
MKGKKVFMILCKKIKLDLSEQDAATLEFMQGKCRGLYNWWVMKLRDGEKWRFNACKKTLAESRVHDPELNQVYGKLLAEVYYRLDAAMKAFFRRLANGETPGFPRVRPRHGFFTLCYPAMYLTLEGNTLILPTGGKGKHKQYPAIRAALTEEPPEGFGEVAISRDGRGNYYASFSYRQPEQAKRDGDTVAFDLGIKTLATGVTEEGRFYHIGGFKGSHWYNKQLDTLRSKRSTCKKKSRRYLHLSKVYKRVSQKKRNKQRDSLHKASHLIARRLVERTVVVGDLSQRQMVMKEHQERKKALNRAVYNDWGLYAFVQMLTYKCQVYGKELHVLDERNTSKQCSGCGNLQDMPLRKRTYRCAECGLVMDRDDNSAVNILMRFLARRGPHTQARPECGVLQATQSGVGVMGTSREGHVQQLNLFECV

SEQ ID NO: 5021 - protein, 417 aa, unidentified
MLLCKKIKLDLREQDAATLEFMQGKCRGLYNWWVMRLRDGETWRFNACKKTLAESRVHDPELNQVYGKLLAEVYYRLDGAMRAFFRRLGNGETPGFPRVRPRHGFFTLCYPAMYLRCEGNTLILPTGGKGKHKQYPAIRAALTEEPPEGFGEVAISRDGRGDYYASFSYREPEQARRDGGIVAFDLGLKTLATGVNEEGRIYHIGGFKGSRWYNKQLDRLRSKRSTCKKKSRRYLHLSKVYKRVAQKKRNKQRDSLHKASHLIARRLVERTVVVGDLSQRQMVMKEHQERKKALNRAVYNDWGLYAFVQMLTYKCQVYGKELHVLDERNTSKQCSGCGKLQAMPLRKRTYRCAECGLVMDRDDNSAVNILMRFLARRGPHTQARPECGVLQATQSGVGVMGASREGHVQQLNLFECG

SEQ ID NO: 5022 - protein, 381 aa, unidentified
MDRTIRIQLKPTHEQKQLLDETTRQFTQVFNAVCAYGWQHSEKNGVRLHHATYYDLREAYPRLNANVLIQARIKATEALKSAFDRKAKGRKAGQPQSRQCPIRYNERTSVLNWQTQEVCLSTVEGRILVPFQVPPYSSKYAGYQVTTADLCIRNERYWLHVVVSVPEPDVPQSDEVIGVDLGLNRPAVTSNRHFLGSRHWKEVERRRFRLRRKLQSKGTKSAKRHLKKLSGRSLRFHRDCDHVLSKRIVEHATPGSTLVIENLTHIRSTSKIRKKTETSRRLHSWSFAQFHTFLSYKAQERGMQVVKIDPRHTSQTCSQCGHQARNNRRSQSVFHCRSCGYQLNADLNAAYNIRDKFCLAQGGTSVLSGPLSDGLSSHASV

SEQ ID NO: 5023 - protein, 380 aa, unidentified
MDRTVRIQLKPTHEQKQLLDETTQQFTQVFNAVCAYGWQHGEKNGVRLHHATYYELREAYPRLNANVLIQARIKATEALKSAFDRKAKDRKARQPRSKLCPIRYNERTYVLNWQTQEVSLSTINGRILVPFKVPPYSSKYAGYQVTTADLCISNGRYWLHVVVSVPDPNIPRHDEVIGVDLGLNRPAVTSNRHFLGSRHWKEIERRRFRLRRKLQSKGTKSAKRHLKKVSGRSLRFHRDCDHVLSKRIVQNATSGSTIVIENLTHIRSTSKIRKKTETSRRLHNWSFAQFHSFLIYKAQERGMQVVKIDPRHTSQTCSQCGHQHRSNRKSQSLFLCKHCGYCLNADLNAAYNIRNKHLASLGTSLASGSPSDGLASQASA

SEQ ID NO: 5024 - protein, 417 aa, unidentified
MILCKKIKLDLSEQDAATLEFMQGKCRGLYNWWVMKLRDGEKWRFNACKKTLAESRVHDPELNQVYGKLLAEVYYRLDAAMKAFFRRLANGETPGFPRVRPRHGFFTLCYPAMYLTLEGNTLILPTGGKGKHKQYPAIRAALTEEPPEGFGEVAISRDGRGNYYASFSYRQPEQAKRDGDTVAFDLGIKTLATGVTEEGRFYHIGGFKGSHWYNKQLDTLRSKRSTCKKKSRRYLHLSKVYKRVSQKKRNKQRDSLHKASHLIARRLVERTVVVGDLSQRQMVMKEHQERKKALNRAVYNDWGLYAFVQMLTYKCQVYGKELHVLDERNTSKQCSGCGNLQDMPLRKRTYRCAECGLVMDRDDNSAVNILMRFLARRGPHTQARPECGVLQATQSGVGVMGTSREGHVQQLNLFECV

SEQ ID NO: 5025 - protein, 381 aa, unidentified
MDRTIRIQLKPTHEQKQLLDETTRQFTQVFNAVCAYGWQHSEKNGVRLHHATYYKLRETYPRLNANVLIQARIKATEALKSTFDRKAKGRKAGQPQSRQCPIRYNERTSVLNWQTQEVCLSTVEGRILVPFQVPLYSSKYAGYQVTTADLCIRNGRYGLHVVVSVPEPDVPQSDEVIGVDLGLNRPAVTSNRHFLGSCHWKEVERRRFRIRRKLQSKGTKSAKRHLKKLSGRSLRFHRDCDHVLSKRIVEHATPGSTLVIENLTHIRSTSKIRKKTETSRRLHSWSFAQFHTFLSYKAQERGMQVVKIDPRHTSQTCSQCGHQHRSNRKSQSLFLCKNCGYCLNADLNAAYNIRNKHLASLGISLASGSLSDGLSSQPFVG

SEQ ID NO: 5026 - protein, 489 aa, unidentified
MAKENPSNYKTLQIWIKKGHRMYSYFQECCHNAKNMYNTTNFYIRQVYTGLTQEKELQPLQKEVLANIHKNIGKMNDTQLLAYQKKLEKEKLKPKEEQKEITCNLFSEPNFEKPYVDYNFLDALFKAMIQNDYRALPTRCSQSIMKGVFQNWKSFFASLKDYKKNPNKYAGPPRIPKYIRSSEKEILYTNQDCIIKNDRFLKFPKTKLKLNIGKLGFTEGKLKQVRVIPKYNEYVVELVIDVPYEQQMIEENARYMSIDLGIDNLATIVTNTGMKPVLVKGKHVKSINQYYNKMKSHFTSILRNGKQTNEGPFTSKRIEKLHQKRYLKIKDVFHKVSHHIVKLAQEEEVCKIVIGQNKGWKQEINMGKRNNQSFCHIPHNLLIQMITYKANAVGIQVVVTEESYTSKASFLDNDFIPTYGENDQNTTFSGKRIKRGIYRSANKTLIHADVNAAANILRKVIPNAWTNGIEGLGVKQLANVLTPLTLIVR

SEQ ID NO: 5027 - protein, 468 aa, unidentified
MHRTARIGLRITRAQRQRCFGLLRSAGDVWACVLEINAWRRRRRDKPAAGYQELCRLLAQSGPGTFGELDTTGARSVLRRYSDAWFSAAARRKAGHVEVRFPRRRRGLMPVRWHHGTFTVTVRVLRIPTARGCPPLTVRLDRPIPYPADTVRSVTLLFADGRLSVDITVELPVTAYSAGQEPDPRRVAGVDLGIIHPFAVATAGGGHSLLVSGRAIRAEHRMHLADTKGRRRAAAARAPGKGQRGSRRWRKTRRRARLVEGRHRRRVRQALHEAAKTVVSWAVHQRIGTLTVGDPRGVLDLPAGRRHNLRLRQWQIGRTLQILQDKAALAGIRVHLVDERGTSSTCPACQKRISQPRGRNMTCPHCAFAGHRDLAAAYTIAGRTPGGATTTPPAASGGVVTHRRAGRHLPGVARARRDPRRRPPRTVTAGSVGRRRPAPPTLVGSRSPKGEDPQLSRGTPGERSWTPH

SEQ ID NO: 5028 - protein, 469 aa, unidentified
MVHRTARIGLRITRAQRQRCFGLLRSAGDVWACVLEVNAWRRRRRDKPAAGFQELCRLLAQSGPGTFGELDSVGARSVLRNYSDAWFSAAARRKAGHSQVRFPRRRRGLMPVRWYHGTFTVTGQVMRIPTARGCPPLAVRLDRPIPYPADTVRSVTLLFADGRLCVDVTAELPVTVYPAGQEPDPRRVAGVDLGIIHPFAVATADGEHSLLVSGRAIRAEHRMHLADTKTRRRATAARAPSKGERGSRRWRKTRRRARLIEGRHRRRVRQALHEAAKTVVGWAVHQRVGTFTVGDPRGVLDLPAGRRHNLRLRQWQIGRTLQILQDKAALAGIRVHLVDERGTSSTCPACHRRISKPRGRNMTCPHCAFAGHRDLAAAYTIAGRTPDGATTTPPATPGGMVTHRRAGRHLPGVARARRDPRRRPPRTATEGSVGRRRPAPPPAVGSRSPNGEDPQLHRTTPGERSWTPH

SEQ ID NO: 5029 - protein, 482 aa, unidentified
MPRRRNVATGPVVHRTARIGLRLTRAQRQRCFGLLRAGGDVWACILEINTWHRRRGDKPVAGFPELCGLLAASGPGTFGELDSTGARSVLRRYSDAWFSAAARRKAGHHEVRYPRRRRALMPIRWYHGTFTVSGRQVRLPAARGCPPVLVRLDRSVPYPPGTVRSVTLLFDAGRLWLDVTAELPVATYPPGTGPDPGRVAGVDLGIIHPYAAANPADGTGLLISGRAIRAEHRMHLADTKHRRRATAGHAPKKGQKGSRRWRKMRRRARLVEARHRRRTGQALHEATTTLISWAVEQRIGVLTVGDPRGVLNKPAGRRHNLRLRQWQLGRTLHILQDKAALAGIRVHLVDERGTSSTCPACHQKISKPRGRTMTCPHCTFAGHRDLAAAFTIATRTPGGAPTTPAQPCSGVVTHRRAGRHLPGAGPARRDPRRRPPRPAASGSLGRRRPAPPALVGSRSLTPVNEDPQHHRTQPGQRSWTPH

SEQ ID NO: 5030 - protein, 482 aa, unidentified
MPGRRNVATGPVVHRTARIGLRLTRAQRQRCFGLLRAGGDVWACVLEINAWHRRRGDKPVAGFPELCGLLSASGPGTFGELDSAGARSVLRRYSDAWFSAAARRRAGHHEVRYPRRRRALMPIRWYHGTFTVCRRQVRLPAARGCPPVLVRLDRTVPYPPGTVRSVTLLFDAGRLWLDVTAELPVATYPPGTGPDPGRVAGVDLGIIHPYAAANPADGTGLLISGRAIRAEHRLHLADTKARRRATARRAPSPGQRGSRRWRKMRRRARLVEARHHRRTRQALHEATTTLISWAVEQRIGTLTVGDPRGVLDKPAGRRHNLRLRQWQLGRTLHILQDKAALAGIRVHLVDERGTSSTCPACHQKISKPRGRTMTCPHCRFAGHRDLAAAFTIATRTQGGATTTPANPCSGVVTHRRAGRHLPGAGPARRDPRRRPPRPAALGSLGRRRPAPPLPVGSRSLTPVNEDPQHHRTQPGQRSWTPH

SEQ ID NO: 5031 - protein, 482 aa, unidentified
MTRRRNVDTGPVVHRTARIGLRLTRAQRQRCFGLLRSAGDVWACVLEINAWRRRRGDRPVASFYELCGLLSASGPGTFGELNTAGARSVLRRYSDAWFSAAARRKAGHSEVRYPRRRRTLMPVRWYHGTFALSGRQVRLPAARGCPPLLVRLDRTVPYPAGTVRSVTLVFDAGRLWLDVTAELPIASYRPGTARDQNRVAGVDLGIIHPYAAANPADGTALLVSGRAIRAEHRMHLADTKARRRGTARHAPGKGQKGSRRWRKMRRRARLIEARHHRRTRQALHEATTTLICWAVEQRIGTLTVGDPRDVLNKPAGRRHNLRLRQWQIGRTLQILQDKAALAGIQVHLVDERGTSSTCPNCHKRISKPRGRNMTCPHCTFAGHRDIAAAFTIATRTPGGAITPEALRCSGVVTHRRAGRHLPGAGPARRDPRRRPSRPSAPGSFGRRRPASPSVVGSRSLTLVNEDPQQRRDQPGGRSWTPH

SEQ ID NO: 5032 - protein, 400 aa, unidentified
MQRLQAFKFELTPNGEQQRKMRRFAGACRFVFNKALALQKENHEAGGKFIGYVAMAKHLTAWRNGTETPWLKDAPVHPLQHALKDLERAYKNFFAKRAAFPRFKKKGHSDSFRYPDSKQIKLDQVNNRVFLPKLGWLRYRNSRDVLGEVRNATVSRNAGKWFVSIQTGREVAQPVPQATSAIGIDLGIARFATLSDGSFLAPLNSFKRHEARLRRAQRAMSRKVKFSNNWKKAKARIQRIHAGIGNARRDYLHKATTTISQNHAMVCIEDLQVRNMSKTAAGSPDAPGKNVRAKSGLNKAILDQGWFEFRRQLDYKLAWHGGWLIAVPPANTSRTCPACEYASAENRQTQAAFRCVACGHEEHADVVGAINILARGHRVAACGEPVQSGRSVKQEPAEAL

SEQ ID NO: 5033 - protein, 406 aa, unidentified
MVKLGRTIKLRLYPDTNQAEQFLAMSQEYQRVANIVSQWIFDHEFQLSWLKINHYLYKIFRQESSLNSQMVQSVFRTVVARYKTVQEQMKQHPYRYQNEEKKWVQVPRDLNWLVTPIQFRRPQADLVRQSNYSFVDSMREISITTLGKRTKLGFTDKGFEKYFTDDWKLGTAKLVHSRGKWFLHIGITKEVNDFDAKDNPKVVGIDRGLRFLATTFDSEGKALFFDGQKILLKRKKFLEIRRQLQSKGTKSAKKKLKRLAQRENRWMTDVNHRLAKTLVARYGSHTLFVLEDLTNVTFNTDDLPKSLRNSHRSWSFFQLESFLTYKAQAIQSTVVKVNPAFTSQRCHKCGLVEKTNRHHETHEYWCSQCQYRCNDDRLGAMNIEMLGQDWLNGVKHPKIKKLTTVG

SEQ ID NO: 5034 - protein, 406 aa, unidentified
MVKLGRTIKLRLYPDTNQAEQFLTMSQEYQRLANVVSQWIFDHEFQLSWLKINHHLYKIFRQESPLNSQMVQSVFRTVVARYKTVQEQMKQHPYCYKNEEHKWIQVPRDLNWLVKPIQFRRPQADLVRHSNYSFVEGMQQISITTLGKRTKLGFTDKGFEKYFTEDWKLGTAKLVHTQGKWFLHIGITKESSDFNPKDSPQIVGIDRGLRFLATIFDSEGKALFFEGKKILLRRKKFLEIRRQLQSKGTKSAKKKLKRLAQRENRWMTDVNHWLAKTLVTRYGSHTLFVLEDLTNVTFNTDDLPKSLRNSHRSWSFFQLESFLTYKAQAIQSTVVKVNPAFTSQRCPKCGLVEKTNRHHETHEYWCAQCQYRCNDDRLGAMNIEMLGQEWLSGVKKPKIKKLTTVG

SEQ ID NO: 5035 - protein, 406 aa, unidentified
MVKLGRTIKLRLYPDTNQAKQFLAMSQEYQRVANIVSQWIFDHEFQLSWLKINHQLYKQFRKESPLNSQMVQSVFRTVVARYKTVQEQLKQHPYRYKNEEKKWVQVPRDLNWLVTPIQFRRPQADLVRQSNYSFVDKMQQISITTLGKRTKLGFTDKGFEKYFTDDWKLGTAKLVHTQGKWFLHIGITKETSDFNPKDSPQIVGIDRGLRFLATIFDSEGKTLFFDGQKILLRRKKFLEIRRQLQSKGTKSAKKKLKRLAQRENRWMTDVNHWLAKTLVTRYGSHTLFVLEDLTNVTFNTDDLPKSLRNSHRSWSFFQLESFLTYKAQAIQSTVVKVNPAFTSQRCPKCGLVEKTNRHHETHEYWCSQCQYRCNDDRLGAMNIEMLGRDWLNGVKRPKIKKLTAAG

SEQ ID NO: 5036 - protein, 406 aa, unidentified
MVKLGRTIKLRLYPDTDQAADFSAMSQEYQRLANIVSQWIFDHEFQLSWLKINHHLYKMFRQESPLNSQMVQFVFRTVVARYKTVREQMKQHPYCYKNEEHKWVQVTRDLNWLVQPIQFRRPQADLVRHSNYSFVEDMQQISITTLGKRTKLEFTSKGFEKYFTEDWKLGTAKLVHNRGKWFLHIGITKETSDFNPKDNPQIVGIDRGLRFLATAFDSEGKTLFFDGQKILLKRKKFLEIRRQLQSKGTKSAKKKLKQLAQRENRWMTDVNHWLAKTLVAAYGSHTLFVLEDLTNVTFNTDDLPKSLRNSHRSWSFFQLESFLTYKAQAIQSTVVKVNSAFTSQRCPKCGLVEKANRHHETHEYWCKQCQFRCNDDRLGAMNIEMLGQEWLSGVKRPKIKKLTAVG

SEQ ID NO: 5037 - protein, 406 aa, unidentified
MVELGRTIKLRLYPDTNQAEQFLAMSQEYQRVANVVSQWIFDHEFQLSWLKINHYLYKIFRQESPLNSQMVQSVFRTVVARYKTVREQMKQHPYRYQNEEKEWVQVPRDLNWLVNPIQFRRPQADLVRQSNYSFVDKMQQISITTLGKRTKLRFTDKGFENYFTDNWKLGTAKLVHTQGKWFLHIGITKEVSDFNPKDIPQIVGIDWGLRFLATIFDSEGKVLFFDGQKILLKRKKFLEIRRQLQSKGTKSAKKKLKRLAQRENRWMTDVNHQLAKTLVARYGSHTLFVLEDLTNVTFNTDDLPKSLRNSHRSWSFFQLESFLTYKAQAIQSTVVKVNPAFTSQRCPKCGLVEKTNRHHETHEYWCAQCQYRCNDDRLVAMNIEMLGRDWLNGIKRPKIKKLTAIG

SEQ ID NO: 5038 - protein, 406 aa, unidentified
MVKLGRTIKLRLYPDSKQSTEFLAMSREYQRLANIVSQWIFDHEFPLSWLKINHQLYQVLRQESPLNSQMIQSVFRTVAARYKTVQEQMKQHSRRYKNEDNKWIQVPRDLNWLVKPIYFRRPQADLVRQRNYSFVDEMKQISITTLGKRTKLCFTDKGFEDYFHGNWKFGTAKLVHNRGKWFLHIGITKEVDDFDKQGCPKIVGIDRGLRFLATIYDHLGKTLFFDGQKVLRKRKRFLEIRRQLQSKGTKSAKKKLKQLAQRENRWMSDLNHRIAKTLVALYGSHTLFVLEDLTNVTFNTDDLPRSLRNSHRSWSFFQLESFLTYKAQAIQSNVVKVNPAFTSQRCPKCGLVEKASRHHDTHEYWCKQCQYRCNNDRLGAMNIEMLGQEWLNGVKHPKIKKLTTVG

SEQ ID NO: 5039 - protein, 406 aa, unidentified
MTKLGRTIKLRLYPDNRQSTDFLAMSREYQRLANIVSQWIFDHEFPLSWLKINHQLYQVLRQESQLNSQMIQSVFRTVAARYKTVQEQMKQHPHRYKSENKKWVQVPRDLNWLVKPIHFRRPQADLVRQKNYSFVDDMKQISITTLEKRTKLCFTNKGFEDYFHGGWKLGTAKLVHSRGKWFLHIGITKEVDDFDKQGCPKIVGIDRGLRFLATIYDHLGKTLFFDGQKILRKRKKFLEIRRQLQSKGTKSAKKKLKQLAQRENRWMTDVNHRIAKTLVALYGSHTLFVLEDLTNVTFNTDDLPKALRNSHRSWSFFQLESFLTYKAQAIQSTVVKVNPAFTSQRCPKCGLVEKINRHHDTHEYWCAQCQYRCNDDRLGAMNIEMLGQDWLSGIKHPKIKKLTTVG

SEQ ID NO: 5040 - protein, 406 aa, unidentified
MTKLGRTIKLRLYPDTNQADQFLAMSHEYQRLANLVSQWIFDHEFQLSWLKINHHLYKILRQGSPLNSQMVQSVFRTVVARYKTVQEQMKQHPYRYENEENKWIQVSKDLSWLVKPIQFHRPQADLVRQSNYSFVDKIRQISITTLGKRTKLGFTDKGFEKYFTGNWKLGTAKLVHNQGKWFLHIGITKGVPDFDQQGKPQIVGIDRGLRFLATTFDSEKRTLFFDGQKILRKRKKFLETRRQLQSKGTRSAKKKLKQLAQRENRWMTDVNHRLAKTLVVIYGSHTLFVLEDLTNVTFNTDDLPKALRNSHRSWSFFQLESFLTYKAQAIQSAVLKVSPAFTSQRCPKCGLVEKTNRHHETHEYWCQQCQYRCNDDRLGAINIEMLGRDWLSGIKHPKIKKLTTAG

SEQ ID NO: 5041 - protein, 406 aa, unidentified
MVKLGRTIKLRLYPDSKQSADFLAMSREYQRLANIVSQWIFDHEFPLSWLKINHQLYQVLRQESPLNSQMIQSVFRTVAARYKTVQEQMKQHPRRYKSEDNKWVQVPRDLTWLVKPIHFRRPQADLVRQRNYSFVDEMNRISISTLGKRTKLCFTDKGFEDYFHGDWKLGTAKLVHNRGKWFLHIGITKEVDDFDKQGCPKIVGIDRGLRFLATIYDHLGKTLFFDGQKVLRKRKKFLEIRRQLQSKGTKSAKKKLKQLAQRENRWMSDVNHRIAKTLVALYGSHTLFVLEDLTNVTFNTDDLPKSLRNSHRSWSFFQLESFLMYKAQEVQSTVVKVNPAFTSQRCPKCGLVEKTNRHHETHEYWCIQCQYRCNDDRLGAMNIEMLGRDWLNGVKHPKIKKLTAIG

SEQ ID NO: 5042 - protein, 406 aa, unidentified
MVKLGRTIKLRLYPDTDQADQFLAMSQEYQRLANIVSQWIFDHEFQLSWLKINHQLYKRFRQETSLNSQMVQSVFRTVVARYKTVREQMKQHPYRYKNGEKKWIQVPRDLNWLVKPIHFRRPQADLVRQSNYSFVEDMQQISITTLGKRTKLAFTSKGFAKYFTDDWKLGTAKLVHNRGKWFLHIGITKEVPDFNQQGNPQIVGIDRGLRFLATAYDSEGKTLFFDGQKILRRRKKFLEIRRQLQSKGTKSAKKKLKQLAQRENRWMTDVNHWLAKTLVALYGSHTLFVLEDLTNVTFDTDDLPKSLRNSHRSWAFFQLEFFLTYKAQAIESNVVKVNPAFTSQRCPKCGLVDKANRHHDTHEYWCKQCQYRCNDDRLGAMNIKMLGQEWLSGVKRPKIKKLTTAG

SEQ ID NO: 5043 - protein, 480 aa, unidentified
MPRHRDAGTGPVVHRTARIGLRITRAQRQRCFGLLRSAGDVWACVLEVNAWRRRRRDKPAAGFQELCRLLAQSGPGTFGELDSVGARSVLRNYSDAWFSAAARRKAGHSQVRFPRRRRGLMPVRWYHGTFTVTGQVMRIPTARGCPPLAVRLDRPIPYPADTVRSVTLLFADGRLCVDVTAELPVTVYPAGQEPDPRRVAGVDLGIIHPFAVATADGEHSLLVSGRAIRAEHRMHLADTKTRRRATAARAPSKGERGSRRWRKTRRRARLIEGRHRRRVRQALHEAAKTVVGWAVHQRVGTFTVGDPRGVLDLPAGRRHNLRLRQWQIGRTLQILQDKAALAGIRVHLVDERGTSSTCPACHRRISKPRGRNMTCPHCAFAGHRDLAAAYTIAGRTPDGATTTPPATPGGMVTHRRAGRHLPGVARARRDPRRRPPRTATEGSVGRRRPAPPPAVGSRSPNGEDPQLHRTTPGERSWTPH

SEQ ID NO: 5044 - protein, 480 aa, unidentified
MPRYREAGTGPVVHRTARIGLRITRAQRQRCFGLLRSAGDVWACVLEINAWRRRRRDKPAAGYQELCRLLAQSGPGTFGELDTTGARSVLRRYSDAWFSAAARRKAGHVEVRFPRRRRGLMPVRWHHGTFTVTVRVLRIPTARGCPPLTVRLDRPIPYPADTVRSVTLLFADGRLSVDITVELPVTAYSAGQEPDPRRVAGVDLGIIHPFAVATAGGGHSLLVSGRAIRAEHRMHLADTKGRRRAAAARAPGKGQRGSRRWRKTRRRARLVEGRHRRRVRQALHEAAKTVVSWAVHQRIGTLTVGDPRGVLDLPAGRRHNLRLRQWQIGRTLQILQDKAALAGIRVHLVDERGTSSTCPACQKRISQPRGRNMTCPHCAFAGHRDLAAAYTIAGRTPGGATTTPPAASGGVVTHRRAGRHLPGVARARRDPRRRPPRTVTAGSVGRRRPAPPTLVGSRSPKGEDPQLSRGTPGERSWTPH

SEQ ID NO: 5045 - protein, 406 aa, unidentified
MVKLGRTIKLRLYPDSKQSAGFLAMSREYQRLANIVSQWIFDHGFPLSWLKINHQLYQVLRQESQLNSQMVQSVFRTVAARYKTVQEQMKQHPYRYKNEDKKWVQVPRDLNWLVKPIHFRRPQADLVRQRNYSFMGEMKQISITTLDKRTKLCFTDKGFEDYFHGDWKFGTARLVHSRGEWFLHIGITKEVDDFDKQGCPKIVGIDRGLRFLATIYDHLGKTLFFDGQKVLRKRKKFLEIRRQLQSKGTKSAKKKLKQLAQRENRWMSDVNHRIAKTLVTLYGSHTLFVLEDLSNVTFNVDDLPKSLRNSHRSWSFFQLESFLTYKAQAIQSTVLKVSPAFTSQRCPKCGLVEKTNRHHDTHEYWCKQCQYRCNDDRLGAMNIEMLGQEWLNGVQRPKIKKLTAIG

SEQ ID NO: 5046 - protein, 406 aa, unidentified
MVKLGRTIKLRLYPDTNQAEQFLAMAQEYQRLANIVSQWIFDHEFPLSWLKINHHLYKIFRQESPLNSQMVQSVFRTVVARYKTVQEQMKQHPSHYKDEENKWVQVPRDLAWLEKPVQFRRPQADLVRQSNYSFVDSMQEISITTLGKRTKLRFTDKGFEKYFTDDWKLGTARLVHNRGKWFLHIGITKETSDFNPKDNPQIVGIDRGLRFLATTFDSEGKTLFFDGQKILRKRKKFLEIRRQLQSKGTKSAKKKLKRLAQRENRWMTDVNHWLAKTLVTRYVSHTLFVLEDLTNVTFNTDDLPKSLRNSHRSWSFFQLESFLTYKAQAIQSTVVKVNPAFTSQRCPKCGLVEKTNRHHETHEYWCAQCQYRCNDDRLGAMNIAMLGQSWLNSVKRPKIKKLTTAG

SEQ ID NO: 5047 - protein, 406 aa, unidentified
MVKLGRTIKLRLYPDIKQSADFLAMSKEYQRLANIVSQWIFDHEFPLSWLKINHQLYQVLRQESPLNSQMIQSVFRTVAARYKTVQEQMKQHPRRYKNEDNKWVQVPRDLTWLEKPIHFRRPQADLVRQKNYSFVDEMKQISITTLGKRTKLCFTDKGFEDYFCGDWKLGTARLVHSRGKWFIHIGVTKEVDDFDKQGCPKIVGIDRGLRFLATIYDHLGKTLFFDGQKVLRKRKKFLEIRRQLQSKGTKSAKKKLKQLAQRENCWMTDVNHRIAKTLVAVYGSHTLFVLEDLTNVTFNTDDLPKSLRNSHRSWSFFQLESFLTYKAQAIQSTVVKVNPAFTSQRCPKCGLVEKTNRHHDTHEYWCVQCHYRCNDDRLGAMNIEMLGQNWLSGVKHPKITKLTTVG

SEQ ID NO: 5048 - protein, 418 aa, unidentified
MLETTRTYVARITNHQQVRDDLDQCGFSASKLWNVGRYYIQGRWDEEGEIPDEAELKSELKAHERYSDLHSQSSQRVLEELAEAFTGWYNSDAGNNPPGYRKRGDRHPRSTVTWKQKGIKHDAKHGQLRLSKGWNLKDGRSDFILAEYETRPDVEVENIQQVRAVWNGDEWELHLVCKKEIPVEDAPGDNTAGIDLGISNYLAIDYEDGPSELYPGNTLKEDKHYFTREEYQTEGENGPSKRALKARRKLSRRKDHFLHTLSKHIVERCVEKSVGKIAVGDLSDIREDENGDSRNWGQSGNKKLHGWEFDRFVCLLEYKAEEHGILVDRVDEENTSKTCSCCGQIRDANRVERGLYVCSSCETAMNADVNGAVNIRRKITQSPPTGDMSNGWLAQPGVFLFDRESGRFTSREQGVCKP

SEQ ID NO: 5049 - protein, 295 aa, unidentified
MKRLQAFKYELQPNGEQARSMRRFAGSCRFVFNKALAMQKAIYEGGEKKVGYAGLCKELTTWKTQPETAWLKETHSQVLQQSLKDLERAYKNFFDKRADFPRFKKKGMGDSFRYPQGCKLDQSNSRVFLPKLGWLKYRNSRDVLGTVSNITVSANGGKWFVSIQTEREVEQPVHPATSIVGIDVGITRFATLSDGSHIEPLNTFRKHQQRLARYQRAMSRKTKFSSNWKKAKARVQKIHTRIANVRKDFLHKTTTTISKNHAIVCIEDLQVRNMSKSAAGSWVFWTNVTGHSDLS

SEQ ID NO: 5050 - protein, 477 aa, unidentified
MTYETQQIWIKKGHKMYGYCQSSCQNAKNMYNTTNFYIRQVFTAFKSEKPLQPLQEEVLNEIKTNLDGMNENQLLAYKRKLEKENKKPKEERKEIKANLFQLPTKEKPFLSYGFLDALFKRTGQADYRSLPTQSSQWIMKSAFEDWKNFFKSLRDYKKHPHKYNGRPNIPGYSKASQKELLLTNQDCTIKQDRYLKFPKTKTKLNIGKLGYNGKKLKQVRIIPKYNHYVIEVVFQGEEKDLLEDNGRYMGIDLGVNNLATIITNTGMTPVLYKGKRVKSDNHFYNKKRAHYVGILRRGQNEKTGLFSSARLERLHRKRFLKLKDQFHKVSHGIIRIALEEDVNTIVIGENLGWKQSVKTGKRNNQAFCHIPHTLLIQMIRYKAERLGITVKLTEESYTSKASFLDGDDLPLYKEGETHAFSGKRVKRGLYRTKNDILLNADVNGACNILKKVVPDAFKGLDGIEGLFVSTPWVLSVR

SEQ ID NO: 5051 - protein, 477 aa, unidentified
MTYETQQIWIKKGHKMYGYCQSSCQNAKNMYNTTNFYIRQVFTALQSEKPLQPLQEEVLNEIRTNLDGMNENQLLAYKRKLEKENKKPKEERKEIKANLFQLPTKEKPFLSYGFLDALFKYRVQADYRSLPTQSSQWIMKSAFEDWKNFFKSLRDYKKLPHKYKGRPNIPSYSKASQKELLLTNQDCTIKQDRYLKFPKTKTKLNIGKLGHSGKKLKQVRIIPKYNHYVIEIVFQGEETDLLEDNERYMGIDLGVNNLATIITNTGMTPVLYKGKRAKSDNHYYNKKRAHYVGILRHGQNEKTGLFSSARLERLHRKRFLKLKDQFHKVSHGIIRIALEENVNTIVIGKNLGWKQSVKTGKRNNQAFCHIPHTLLINMIRYKAERLGITVKLAEESYTSKASFLDGDDLPLYKEGETHLFSGKRVKRGLYRTKNGILLNADVNGACNILRKVVPEAFNGLDGIEGLFVSTPRVLSVR

SEQ ID NO: 5052 - protein, 477 aa, unidentified
MTYETQQIWIKKGHKMYGYCQSSCQNAKNMYNTTNFYIRQVFTALQSEKPLQPLQEEVLNEIRTNLDGMNENQLLAYKRKLEKENKKPKEERKEIKANLFQLPTKEKPFLSYGFLDALFKYRVQADYRSLPTQSSQWIMKSAFEDWKNFFKSLRDYKKLPHKYKGRPNIPSYSKASQKELLLTNQDCTIKQDRYLKFPKTKTKLNIGKLGHSGKKLKQVRIIPKYNHYVIEVVFQGEETDLLEDNGRYMGIDLGVNNLATIITNTGMTPVLYKGKCAKSDNHYYNKKRAHYVGILRHGQNEKTGLFSSARLERLHRKRFLKLKDQFHKVSHGIIRIALEEDVNTIVIGKNLGWKQSVKTGKRNNQAFCHIPHTLLINMIRYKAERLGITVKLAEESYTSKASFLDGDDLPLYKEGETHVFSGKRVKRGLYRTKNGILLNADVNGACNILRKVVPDAFNGLDGIEGLFVSTPRVLSVR

SEQ ID NO: 5053 - protein, 477 aa, unidentified
MIYETQQIWIKKGHELYGYCQSSCQNAKNMYNTTNFYIRQVFTAFKSEKPLQPLQEEVLNEIKTNLDGMNENQLLAYKRKLEKENKKPKEERKEIKANLFQLPSKEKPFLSYGFLDALFKRTGQADYRSLPTQSSQWIMKSAFEDWKSFFKSLRDYKKHPHKYKGRPNIPGYSKASQKELLLTNQDCTIKQDKYLKFPKTKTKLNIGKLGNSGKKLKQVRIILKYNHYVIEVVFQGEEKDLLEDNGRYMGIDLGVNNLATIITNTGMTPVLYKGKRVKSDNHFYNKKRAHYVGILRHGQNEKSGAFSSARLERLHRKRFLKLKDQFHKVSHGIIRIALEENVNTIVIGKNLGWKQSVKTGKRNNQAFCHIPHALLINMIRYKAERLGITVKCTEESYTSKASFLDGDDLPLYKEGETHVFGGKRVKRGLYRTKNGILLNADVNGACNILRKVVPDAFKGLDGIEGLFVSTPRVLSVR

SEQ ID NO: 5054 - protein, 398 aa, unidentified
VVRENSKPVEERKEIKCHLFKEPSSEKPYIGYNFLDALFKAMAQNDYRSLPTQSSQGIMKTVFQNWKSFYGGLRAYKTEPSRFKARPRIPGYSRRKEKEVLFSNQDCVIKGEKFLKFPKTKERLNIGKFGFTDGKLKQVRLIPKHGHYLVELVFQIPAEPEMKESKKRYMSIDLGIDNLATIVTNTGREPVLVKGKNIKSINQCYNRLKAHYIGILRQGKDTKEGPYTSKRLEKISHKRFNQIKDLFHKASHQITNIALEEDIDTIIIGQNKDWKQNSKMGKRNNQSFTTIPHQLLIQMIEYKAQRHGIKVIKTEESYTSNASFLDHDDIPVYGGNDLEKSFSGKRVKRGLYQSKNGIIVNADVNGAGNIMRKIFPKAFEEPFACVEMLLRPTSIILK

SEQ ID NO: 5055 - protein, 483 aa, unidentified
MLKKNPTFYYKTDQIWIKPGHCMHPYFNQMCQHAKNMYNVVNFYIRQVFTGLKAETPHPLQQEVLETIRQNLESMNERQRQAYQRRLEKESQKPVEKRKEVTCNLFEAPTKEKPYLHYNFLNSLFLVIKQPDYLSLPIQSSQWVMKTVFQNWKSFYASLKDYKKHPKKYNAKPRIPGYSRTSEKEIIFTNQDCCIKDKKYLKFPKTKEKLTIGKLGLTEGKLMQVRIIPKYGHYVVELITKVEYDPVEPMESNRCMALDLGINNLVSAVTNTGSSPFLIKGGNVKSINQYYNKQKAYLLGILRHGKASNEGQFTSKRLERLHQVRHRKLKDIFHKASRIIVNLALEEKVDTIIIGKNEGWKQKVNMGKIGNQKFIGIPHAILINMIRYKAEKCGIKVITVEESYTSKASFIDRDDLPVYHETKGTPVFTGKRVKRGLYRTCKGLLLNADINGAANIFRKFVSKSPKKQALSLDSVNIWQPKII

SEQ ID NO: 5056 - protein, 471 aa, unidentified
MPDSTFMYRTQQVWIKPGHRLFAYLDQACQNAKNVYNTTNFYIRQVFTAFRSKKKLQPLQQQVLDTITAHVDLMNERRSNKNRLHPFQLPSQEKPFIHYHFLDALFKVIDQTDYRSLPAQSSQGIMKVVFHNWKAFFQSVKDYRKHPDKYNGPPRIPGYARSKVKEVVFSNQDCVIKHQKFLKFPGTQQQLNIGKLGCTDGKLMQVRVIPSHGQYVVEMVFAHSIEKKEVSSEHVLAIDLGVDNLATIVTTTGAKPVVVKGKIVKSINQYYNKIKAYYTGILRQGKKPREGIHTSRRLERLHLKRQRRIKDLFHKASHRIVHIAVEQKVGTIVIGHNDGWKQAPAMGRRNNQTFCHLPHKRLIEMIRYKAAERGMKVILTEESYTSKASFLDQDPLPRYDEEGTWSFTGRRIYRGLYTSPQGLIHADVNGAANIMRKVFPNVSAKEANGIEGLDGHQTINVSTPLVLSLLR

SEQ ID NO: 5057 - protein, 471 aa, unidentified
MADSTFMYRTQQVWIKPGHRLFAYLDQACQYAKNVYNTTNFYIRQVFTAFRSKKPLQPLQQQVLDTLTAHLDLMNERRSNKNRLHPFQLPSQEKPFIHYNFLDALFKVMDQTDYRSLPAQSSQGIMKVVFHNWKAFFQSVKDYRKHPDKYNGPPRIPGYARSKVKEVVFSNQDCVIKHQKFLKFPGTKQQLNIGKLGCTDGKLMQVRVIPSHGQYVVEMVFAHPIEKKEVSSEHVLAIDLGVDNLATIVTTTGAKPVVVKGKIVKSINQYYNKMKAYYTGILRQGKKPREGMHTSRRLERLHLKRQRRIKDLFHKASHRIVDIAVEQKVGTIVIGHNDGWKQAPAMGRRNNQTFCHLPHKRLIEMIRYKADERGMKVILTEESYTSKASFLDQDLLPRYDEEGTWTFTGRRMHRGLYTSPRGLIHADVNGAANIMRKVFPNVSAKGANGIEGLGGHQAINVSTPLVLSLLG

SEQ ID NO: 5058 - protein, 489 aa, unidentified
MAKENPSNYKTLQIWIKKGHRMYSYFQECCHNAKNMYNTTNFYIRQVYTGLTQEKELQPLQKEVLANIHKNIGKMNDTQLLAYQKKLEKEKLKPKEEQKEITCNLFSEPNFEKPYVDYNFLDALFKAMIQNDYRALPTQCSQSIMKGVFQNWKSFFASLKDYKKNPNKYAGPPRIPKYIRSSEKEILYTNQDCIIKNDRFLKFPKTKLKLNIGKLGFTEGKLKQVRVIPKYNEYVVELVIDVPYEQQMIEENARYMSIDLGIDNLATIVTNTGMKPVLVKGKHVKSINQYYNKMKSHFTSILRNGKQTNEGPFTSKRIEKLHQKRYLKIKDVFHKVSHHIVKLAQEEEVCKIVIGQNKGWKQETNMGKRNNQSFCHIPHNLLIQMITYKANAVGIQVVVTEESYTSKASFLDNDFIPTYGENDQNTTFSGKRIKRGIYRPANKTLIHADVNAAANILRKVIPNAWTNGIEGLGVKQLANVLTPLTLIVR

SEQ ID NO: 5059 - protein, 405 aa, unidentified
MQRLQAFKYELMPTGEQQRDMRRFAGSCRFVFNKALALQKENFEAGGKFIGYVAMAKHLTGWRNGRETPWLKDSPVHPLQHALKDLERAYKNFFAKRAAFPRFKKKGQGDSFRYPDPKQIKLDQAHSRIFLPKLGWLRYRNSRNAMGELRNATVSMSAGKWFVSIQTQREVEAPVPQSTSAVGIDVGVARFATFSDGSYLAPLNSFKRHEARLRRAQRSMSRKQKFSCNWKKAKARIQRIQARIGNARRDYLHKATTTISQNHAMVCIEDLQVRNMSRSAAGSVEKPGRNVRAKSGLNKAILDQGWFEFRRQLEYKLAWHGGWLVAVPPENTSRTCPACSSVSAANRLTQARFACIECGFEENADVVGAINVLARGHRVAACGEPVQSGRSAKQEPAEVATQLTA

SEQ ID NO: 5060 - protein, 468 aa, unidentified
MLALTVEFAYVAKTPRVSSRISLVKAPCWCLVRKTKYTCGVKLNAGRADGRCQYSQTSNIVVAMIRLQAYKYELMPTTGQARDMRGFAGSCRFVFNKALMLQKENYEAGRKFISYVEMAKQLTAWRNGAGTPWLKDAPTHPLQHALKDLERAYKNFFAKRAGFPRFRKKGRSDSFRYPDAKQFRIDQANSRIFLPKLGWLRYRNSRDALGTAKNVTVSQSCGKWFVSIQTEREVGQPVPQAAGMVGIDMGITRFATLSNGTFYAPLNSFRRYEARLRKAQRAMSRKAKFGKNWKKARARVQRIHARIGNARRDYLHKTTTTISQNHAMVCVEDLQVRNMSRTAAGSTERPGRHVRAKSGLNKAILDQGWFEFRRQLDYKLAWNGGYLIVVPPQNTSRTCLVCNHVSKDNRQTQSRFACMSCGYENHADVVGAINVLERGQRLLACGETAQSGRSVKQEPAEATQVETA

SEQ ID NO: 5061 - protein, 400 aa, unidentified
MQRLQAFKFELMPTGEQQRDMRRFAGSCRFVYNKALALQRDNYATGGKFISYVAMAKHLTAWRNGPETAWLKDSPVHPLQHALKDLERAYKNFFGKRAAFPRFKKKGKSDRFRYPDPKQIKLDQGNSRIFLPKLGWLRYRNSRRVLGELRNATVSQSAGKWFVSIQTQREVDRPVPQATSAVGIDVGIARFATMSDGTFVAPLNSFKRHEARLRRAQRAMSRKVKFSSNWKKAKARIQRIHSRIGNARRDYLHKATTTISNSHAMVCIEDLQVRNMSRSAAGNTEDPGKNVRTKSGLNKAILDQGWFEFRRQLDYKLAWNGGWLIAVPPANTSRTCPACACVSAENRLTQARFACIECGFEENADVVGAINVLARGHRVAACGEPAQSGRSVKQEPAEAI

SEQ ID NO: 5062 - protein, 485 aa, unidentified
MINKILKRDYRTYQINIMKGHRLHPYFNELFFQSNNLYNASNFYIRQVYTALHSSKKLQPLQQEVMNTLKNNMEKMNERQINSHHKRLAKEKLKPMAEQKEWKPNLFELPSKDNSFLGSHFLDCLFKVIKQPDYYSLPGQMNQQVIRNVIQNWKSFFKSLKTYKANPEKFKGAPSIPGYLPKGGRKEAILSNQICKIQDGKFLRFPKTKMRLNIGKLALQNAAFQQVRIITKYDGFTVEVIFLVGFKKEVPVKKERCMSMDLGIDNISAIAFNTKNAPVLFKGGVIKSTSQWYNKMRAFHYAALRNGQKPKEGPFHSKKLSTLHAKRHRKMKDFFHKVSFHILKIAVENNVDTIIIGKNKDWKQNSNMGKRNNQHFVQIPHALFIELITYKANEKGIAVILTEESYTSRASFLDGDLIPTYKLGNQTNHPFSGKRVKRGLYRTKNNTIINADINAAANILRKVVPNAFANGIAAVCSQPRVVNVH

SEQ ID NO: 5063 - protein, 465 aa, unidentified
MYRTQQVWIKPGHRLFAYLDQACQYAKNVYNTTNFYIRQVFTAFRSKKPLQPLQQQVLDTLTAHLDLMNERRSNKNRLHPFQLPSQEKPFIHYNFLDALFKVMDQTDYRSLPAQSSQGIMKVVFHNWKAFFQSVKDYRKHPDKYNGPPRIPGYARSKVKEVVFSNQDCVIKHQKFLKFPGTKQQLNIGKLGCTDGKLMQVRVIPSHGQYVVEMVFAHPIEKKEVSSEHVLAIDLGVDNLATIVTTTGAKPVVVKGKIVKSINQYYNKMKAYYTGILRQGKKPREGMHTSRRLERLHLKRQRRIKDLFHKASHRIVDIAVEQKVGTIVIGHNDGWKQAPAMGRRNNQTFCHLPHKRLIEMIRYKADERGMKVILTEESYTSKASFLDQDLLPRYDEEGTWTFTGRRMHRGLYTSPRGLIHADVNGAANIMRKVFPNVSAKGANGIEGLGGHQAINVSTPLVLSLLG

SEQ ID NO: 5064 - protein, 401 aa, unidentified
MEVTRVLTINLTRKLTDEQWIILNHLTYSSSKLWNVANYQVMQGNIKINELEKKLKTNFWYKNLHSQSAQAVLQKLKIAWLNYFKQHTKRPRFQPKNGHYPVKWKKDGFKIIGNKLRLSLSKQTRQYLKEKHGIESKFLWVELSKTLPLDAMQVKEVEIVPHDIYGQRFYVLHLIYKKEVNPKKPKEEKVMGIDLGVKNLATTVIQGEKQPLIFDGKILLSKLRWFAKEIARVKSQIAEQGLKTCKRLSKLAVKERNYVNDYIHKISRWIVNLAKEKGVSKIVIGNLTNNFSNIDIGRKNNEKFHKIPFRKLIHRITYKSEEEGISVELVDESYTSQKCSVCGVIKKSNRKYRGLYVCSECGAVINADVNGARNILFSVVPNPEWGLNEILADFVALASLR

SEQ ID NO: 5065 - protein, 404 aa, unidentified
MSKLEVTRVLTINLTRKLTDEQWIILNHLTYSSSKLWNVANYQVMQGNIKINELEKKLKTNFWYKNLHSQSAQAVLQKLKIAWLNYFKQHTKRPRFQPKNGHYPVKWKKDGFKIIGNKLRLSLSKQTRQYLKEKHGIESKFLWVELSKTLPLDAMQVKEVEIVPHDIYGQRFYVLHLIYKKEVNPKKPKEEKVMGIDLGVKNLATTVIQGEKQPLIFDGKILLSKLRWFAKEIARVKSQIAEQGLKTCKRLSKLAVKERNYVNDYIHKISRWIVNLAKEKGVSKIVIGNLTNNFSNIDIGRKNNEKFHKIPFRKLIHRITYKSEEEGISVELVDESYTSQKCSVCGVIKKSNRKYRGLYVCSECGAVINADVNGARNILFSVVPNPEWGLNEILADFVALASLR

SEQ ID NO: 5066 - protein, 489 aa, unidentified
MTKENPSNYKTLQIWIKKGHRMYSYFQECCHNAKNMYNTTNFYIRQVYTGLTQEKELQPLQKEVLDNIHKNIGKMNDTQLLAYQKKLEKEKLKPKEEQKEIKCNLFSEPNFEKPYVDYNFLDALFKAMIQNDYRAMPTQCSQSIMKGLFQNWKSFFASLKDYKKNPNKYAGMPRIPKYIRSSEKEILYTNQDCIIKNGRFLKFPKTKLQLNIGKLGFTEGKLKQVRVIPKYNEYVVELVIDVPSEEQIIEENARYMSIDLGIDNLATIVTNTGMKPVLVKGKHVKSINQYYNKMKSHFTSILRNGKQTNEGPFTSKRIEKLHQKRYLKIKDVFHKVSHHIVKLAQEEEVCKIVIGQNKSWKQETNMGKRNNQSFCHIPHNLLIQMITYKANAVGIQVVVTEESYTSKASFLDNDFIPTYGENDQNTTFSGKRIKRGIYRSANKTLINADVNAAANILRKVIPNAWTNGIEGLGVKQLANVLTPLTLIVR

SEQ ID NO: 5067 - protein, 542 aa, unidentified
MRTWRMTFNPKKQKNSVFCQYFLTNTTDARRMYNTANFYIRNTMTGIKKSPELRTPNEVEVLHDVFTGIQKANKARNIKYQKDLEKYNKGLSEKQPKEPKYFPYPTTKEWFLTYNVLDAVFKYTHNEVYYSMNSQLNQNAIRKAAAAWKGYFKTLKDYRKNPSKYKERPNMPGYLKNPQYVAWFSNQTAKYSVEKDGRAYLRFVHNETLFCIGKASLYTGLRYVKTEIKPQHGCYLILVTFDDGEELPKAPEKPKRIIGIDPGVDNLAAVVNNFGVHSFLIRGGAVKAANQWFNKKRASLLSAVTVGSDSRHSVKNSHFLSALSRKRDDLFRDIFYRAAWYICRFAVRHHTDVIVIGHNKDQKQKIRLGKQNNQSFVSIPFVRFEQILTNTAAKCGIPVIVQEESYTSKASVLDGDVIPTYGIDDDHAYFSGKRVKRGLYRSADGTFLNADVNGAANVIRKKYPDAFDGQNLKYLCKTTNVVKFTDLYPGAKSTCQEHYNGKRHESSPASKAIHRYRKDTRLKYRILFGKSKYVHTSAKKSA

SEQ ID NO: 5068 - protein, 553 aa, unidentified
MHTISIFVDQNRMPKLASYFECQAHLAKNLRNSANFILRNLRTGLKKDPDKRTANENEVIETVRIGIEMANEKLQKDVDRLTKQLQSLPASDTARTKIQKRIDNKQKNHPIMPTSDHWMLTYETLDAVMKNTKNLDYYAMPSQANQQVLRKVLKDWKSHFELLASYRQNPGKFKAQPKQPGYIRTPYTTVTFTNQVAKRSDIKGKMHITFPRCLVPLCVGKPEGSYVRAEVKPCYGGYMVYVTFQDAVKMPEAPTNPTRILGLDPGLDNFLTALTNFPAAPFIIDGHWLKSVNQNFNRRRAVLLSELTKGLDSTKSVKNSARLNRISKKRACQIDDFFYKAAHYIVDFCLKNKVEVIVCGHNKDQKQEINLGSGNNQHFVSIPYTRFFWILTCVAAKAGIPVIETEESYTSKASLIDKDPIPVYKEGERPKYHFSGKRISRGQYESKEGTILNADVNGAGNIIRKVYPNAFDTVSDFSYTNKTVIRVTREVLCHAKHKKKHARPQRKRGMNRWLHHRRQEQKLVYFELFKVSSARDKTRYIEESKQKAAQKTA

SEQ ID NO: 5069 - protein, 405 aa, unidentified
MKRLQAFKYELQPNGEQARSMRRFAGSCRFVFNKALAMQKAIYEGGEKKLGYAGLCKELTTWKTQPETAWLKETHSQVLQQSLKDLERAYKNFFDKRADFPRFKKKGMGDSFRYPQGCKLDQSNSRVFLPKLGWLKYRNSRDVLGTVSNITVSANGGKWFVSIQTEREVEQPVHPATSIVGIDVGITRFATLSDGSHIEPLNTFRKHQQRLARYQRAMSRKTKFSSNWKKAKARVQKIHTRIANVRKDFLHKTTTTISKNHAIVCIEDLQVRNMSKSAAGSSDSPGRNVKAKSGLNKSILDQGWFEFRRQLEYKQVWLGGDVLAVPTRNTSRTCPACGHVSADNRQTQAKFACVDCGYENNADVVGAINVLERGHRLLACGELAQSGRSVKQEPAEATTQGLALV

SEQ ID NO: 5070 - protein, 465 aa, unidentified
MKRLQAFKYELQPNGEQACSMRRFAGSCRFVFNKALAMQKAIYEGGEKKLGYAGLCKELTTWKTQPETAWLKETHSQVLQQSLKDLERAYKNFFDKRADFPRFKKKGMGDSFRYPQGCKLDQSNSRVFLPKLGWLKYRNSRDVLGTVSNITVSANGGKWFVSIQTEREVEQPVHPATSIVGIDVGITRFATLSDGSHIEPLNTFRKHQQRLARYQRAMSRKTKFSSNWKKAKARVQKIHTRIANVRKDFLHKTTTTISKNHAIVCIEDLQVRNMSKSAAGSSDSPGRNVKAKSGLNKSILDQGWFEFRRQLEYKQVWLGGDVLAVSARNTSRTCPACGHVSADNRQTQAKFACVDCGYENNADVVGAINFRAMYLQCRNINRRNLMEAVIRKWGNSPALRLPTSALKEAGYHLEQKVDLIVSRGRIIIQPLKKVEYDLDALVGGVTASNGHSEFGFGKPVGKEVL

SEQ ID NO: 5071 - protein, 405 aa, unidentified
MKRLQAFKYELQPNGEQARSMRRFAGSCRFVFNKALAMQKAIYEGGEKKVGYAGLCKELTTWKTQPETAWLKETHSQVLQQSLKDLERAYKNFFDKRADFPRFKKKGMGDSFRYPQGCKLDQSNSRVFLPKLGWLKYRNSRDVLGTVSNITVSANGGKWFVSIQTEREVEQPVHPATSIVGIDVGITRFATLSDGSHIEPLNTFRKHQQRLARYQRAMSRKTKFSSNWKKAKARVQKIHTRIANVRKDFLHKTTTTISKNHAIVCIEDLQVRNMSKSEAGSSDSPGRNVKAKSGLNKSILDQGWFEFRRQLEYKQVWLGGDVLAVPARNTSRTCPACGHVSADNRQTQAKFACVDCGYENNADVVGAINVLERGHRLLACGELAQSGRSVKQEPAEATTQGLALV

SEQ ID NO: 5072 - protein, 296 aa, unidentified
MKRLQAFKYELQPNGEQARSMRRFAGSCRFVFNKALAMQKAIYEGGEKKVGYAGLCKELTTWKTQPETAWLKETHSQVLQQSLKDLERAYKNFFDKRADFPRFKKKGMGDSFRYPQGCKLDQSNSRVFLPKLGWLKYRNSRDVLGTVSNITVSANGGKWFVSIQTEREVEQPVHPATSIVGIDVGITRFATLSDGSHIEPLNTFRKHQQRLARYQRAMSRKTKFSSNWKKAKARVQKIHTRIANVRKDFLHKTTTTISKKPRDCVHRGFAGTEYVQVRSRQQRFARAQCQSQIWPE

SEQ ID NO: 5073 - protein, 465 aa, unidentified
MKRLQAFKYELQPNGEQARSMRRFAGSCRFVFNKALAMQKAIYEGGEKKLGYAGLCKELTTWKTQPETAWLKETHSQVLQQSLKDLERAYKNFFDKRADFPRFKKKGMGDSFRYPQGCKLDQSNSRVFLPKLGWLKYRNSRDVLGTVSNITVSANGGKWFVSIQTEREVEQPVHPATSIVGIDVGITRFATLSDGSHIEPLNTFRKHQQRLVRYQRALSRKTKFSSNWKKAKARVQKIHTRIANVRKDFLHKTTTTISKNHAIVCIEDLQVRNMSKSEAGSSDSPGRNVKAKSGLNKSILDQGWFEFRRQLEYKQVWLGGDVLAVPARNTSRTCPACGHVSADNRQTQAKFACVDCGYENNADVVGAINFRAMYLQCRNINRRNLMEAVIRKWGNSPALRLPTSALKEAGYHLEQKVDLIVSRGRIIIQPLKKVEYDLDALVGGVTASNGHSEFGFGKPVGKEVL

SEQ ID NO: 5074 - protein, 405 aa, unidentified
MKRLQAFKYELQPNGEQARSMRRFAGSCRFVFNKALAMQKTIYEGGEKKLGYAGLCKELTTWKTQPETAWLKETHSQVLQQSLKDLERAYKNFFDKRADFPRFKKKGMGDSFRYPQGCKLDQSNSRVFLPKLGWLKYRNSRDVLGTVSNITVSANGGKWFVSIQTEREVEQPVHPATSIVGIDVGITRFATLSDGSHIEPLNTFRKHQQRLARYQRAMSRKTKFSSNWKKAKARVQKIHTRIANVRKDFLHKTTTTISKNHAIVCIEDLQVRNMSKSAAGSSDSPGRNVKAKSGLNKSILDQGWFEFRRQLEYKQVWLGGDVLAVPARNTSRTCPACGHVSADNRQTQAKFACVDCGYENNADVVGAINVLERGHRLLACGELAQSGRSVKQEPAEATTQGLALV

SEQ ID NO: 5075 - protein, 456 aa, unidentified
MRHRDERGGRFLRLDYSRSQRGGTEIRGAGACDSCGRSCESRLMIRTHILECHLPRSEADALNRESGRVYTDTLVWHYRIYRRTGHWLSQGAAEKLNDSLSPTTLHAHSRDAAQQAFYKACKTAKATRAEGGKYPHKRKFYRTTSWKATGIRLKDGGLLLARARGLEPVAVVLPSDLATMPKTAFVEMRLVYDLIAKRHRWHLVVDDGVETPLRSEGQTLAADLGEIHPAAIANEAGDVVIFTARDLRALNQYRNKRLASLQTRQSRLTKRSRRWKKLQRRKTYLLARNDRQRRDIEHKVTRAITNHAKAEGAKRLVVGDIRDIANGKRLNRNAQQKVSGWSHGRQIAFLVYKLAAEGVALERQSEAYSSKTCPACGHHNKPKGRNYRCARCGFVGHRDAVGAVNQESQAVHGEFGHVQVGSVKYRRAFVRRSSPDTGHVAREVHPTDGSREAVGL

SEQ ID NO: 5076 - protein, 422 aa, unidentified
MLETTRTYRSRIVNHSQVSDDLDDCGHSASKLWNVARYHSQQEWDETGEIPSEADLKRELKDHERYSDLHSQSSQRVLEELAEAFNGWFKKRKNSDTDATPPGYRKRGDNHPRSTVTWKQNGIKHDTVNDRLRLSKGFNLKTHRSDFILCEYETRPDVTVENIQQVRAVWNGDEWELHLVCKKEIPVEDAPGDNTAGIDLGISNYLAIAYDDGDAELYPGNVLKQDKHYFTRDEYDTEGENGPSRRALRARQKLSRRKDHFLHALAKHVIERCIDHEVGRIAIGDLSDIREDENDDSRNWGKRGNKKLHGWEFDRFTTLLEYKAEEHGILVDRTSERDTSKTCSCCGRKRDANRVERGLYVCESCGATMNADVNGAVNIRRKITQSPPTEDMSNGRLARPAVHLFNQTSGRFAPSEQVGCKP

SEQ ID NO: 5077 - protein, 489 aa, unidentified
MTKENPSNYKTLQIWIKKGHRMYSYFQECCHNAKNMYNTTNFYIRQVYTGLTQEKELQPLQKEVLDHIHKNIGKMNEAQLLAYQKKLEKGKLKPKEEQKEITCNLFSEPNFEKTYVDYNFLDALFKAMIQNDYRALPTQCSQSIMKGLFQNWKSFFASLKDYKKNPNKYAGPPRIPKYIRSSEKEILYTNQDCIIKNGRFLKFPKTKLQLNIGKLGFTEGKLKQVRVIPKYNEYVVELVMDVPSEQQMIEENARYMSIDLGIDNLTTIVTNTGMKPVLVKGKHVKSINQYYNKMKSHFTSILRNGKQTNEEPFTSKRIEKLHQKRYLKIKDVFHKVSHHIVKLAQEEEVCKIVIGQNKSWKQETNMGKRNSQSFCHIPHNLLIQMITYKANAVGIQVVVTEESYTSKASFLDNDFIPTYGENDQNTTFSGKRIKRGIYRSANKTLIHADVNAAANILRKVIPNAWTNGIEGLGVKQLANVLTPLTLIVR

SEQ ID NO: 5078 - protein, 413 aa, unidentified
MKLSFKFRLNINPTQLEIIEELSYHTTKLYNIISYDLRKNGFKNYYEIEKLYKNNWHCDFLHSHTRQEMFKILEQNWKSYFASIKDFGVNPSKYKGSPRPPKFKNTERNKNEIIFTNLAIRFQDGILKLSLSKSIQKLFKVDSLNFEVSNKLQSLINWNRLQQARFNYDKVQKCWYLIVIYNKDEVENSNDNVMSIDIGLDNLATITFKNGINQYVYCGKKLKSVNSYANKRIAYLQAIEMKKYGSDKFKNTKEINRLRKYRNNYINDYLHKVSKNIIDKAIKNNVGKIVIGKLKDIKQDMNYNKSFVQIPIQRLVELITYKAKLKGIEIKLQEESYTSGCSAIDLEPVTKKYYNKSRRITRGLFKSGYGILNADINGSLNILRKSEKCIPDLVNAMRDKGNWTHPQRIRIAC

SEQ ID NO: 5079 - protein, 424 aa, unidentified
MSRIVRTFEATITNQRQVRGDLDQLGWAASKLWNVGRYYAQQRWDETGEIPDDGELKAELKGHERYTDLHSQSSQRVLEELAEAFTGWFGKRRNGDDRARPPGYRKHGDSHPRSTVSFKTAGFKHDAQFTRVRLSKGRNLKEHRSDFILCEYQTRPDVDLTEWDIQQVRAVYKRDEWRLQFVCRAVIDPEPPGDGVAGVDLGICNVAAVSFGGESVLYPGGALKEDEYYFTKKKAMCDDSSSREATRLDRKRTGRRTHFLHALSKAIVEECVERGVGTLVVGDLGGIREDDENGEPRNWGDHGNLDLHRWAFDRFTTLLDYKAEAEGIDVELVAERDTSTSCSACGHTDDNQRVERGLYVCEKCETVANADVNGAENIRQKVLPSLATDGGDRDNGWLAQPAVHLFDCSEGRFAPREQVGNREP

SEQ ID NO: 5080 - protein, 485 aa, unidentified
MTKEKEKHYKTQQIWIKKGHRMYSYFKNSCENAKNMYNTTNFYYRQVYTGLTQDKELQPLQKEVLATIENNIEKMNEIQKAAYQKKRAKEKLKPQEIQKKIKCHWFEAPTKENPYVDYNFLDSLFKIIIQHDYRSLPTQTSQGIMKTVFQNWKSFFASLKEYKINPSKYKARPRIPRYSRASEKEVLFTNQDCIIKENNFLKFPKTKEQLNIGKLGVSEGDLKQVRVIPKYGQYVVELVVDVPNSKEELKTNRRYMSIDLGIDNLATIVTNTGRVPILVKGKNVKSINQYSNKIKAHYLGILRQGKKTNEGPFTSKRLDKLHQKRNLKLKDIFHKASYQIVKTAVEEDVSLIIIGQNKEWKQEVNIGKENNQSFVNIPHKMLINMITYKAAEHGIKVEVTEESYTSKASFLDHDEIPVYEKGKKHSFSGRRMKRGLYKANNNLLINADVNGAANIMKKAILQLFGEKEFNTESVQIFHPQTLVVR

SEQ ID NO: 5081 - protein, 485 aa, unidentified
MPKDEKEKEYRTYQITIKKGHKLYAYFNELCLNSNNLYNATNFYIRQVYTALKQEKELQPLQKEIIDILHKNIDKMNDNQLMSYRKKLAKEKLKLKEEQKVGKANLFEMPTKEKSFVDYHFLDCLFKTIKQKDYYSLPGQVNQQVVKNVIQNWKSFFKSLKEYKKHPGKYKARPNIPGYLPKGSRKETILSNQICKIKDGKHLSFPKIKRKLNIGKIASMNGKYQQVRIIPKYDVFVVEVVFLIGEKKGIKLKKERCMGIDLGLNNIATVVTNTGLRPILFKGGKTKAINQWYNKMRSCYYGILRNGKKQNEGFYHSKKLSALDSKRHRQIKDFFHKVSFNIVKIATENQIDTIIIGKNEGWKQEIDLGKKNNQNFVQIPHSLLIELITYKASAEGIAVIVTEESYTSKASFLDEDDIPTYKSGNEMKFVFSGKRIKRGWYRSKNGRFINADVNGAANILRKVVPKAFVNGIAAVCSQPLVVNVP

SEQ ID NO: 5082 - protein, 433 aa, unidentified
MNVHQEDTLPSASKIVVAAHRPNYTACMQRHQAFKYALRPTGQQERQMRRVAGSCRFVYNQALALQKARHEHGDKKLGYAELCKRLTAWRNGAQTPWLAEAPVHPLQQTLKDLERAYTNFFAQRAAFPRFKKKGQGDSFRYPDPKQIKLDQANRRIFLPKLGWLRYRHSRDVLGAVKNVTVSRSGGQWFVSIQTERAVDPPIPNGGAVGLDLGIVRFATLSDGTYYAPLNSFKRHETALRQAQQALSRKVKFSRNWKKAKARVQKIHSRIGNARRDYLHKTSTTISQNHAMVCIEDLPVRNMSKSAAGTTEQPGKNVRAKSGLNKSILDQGWFEFRRQLDYKLAWKGGWLIAVPPRNTSRTCPCCGHVSADNRRTQARFACVECGFEEHADLVGAINVLRAGHARFACEVSGAVRPPAAGTHRSDSGTAQCRV

SEQ ID NO: 5083 - protein, 420 aa, unidentified
MSASSNVIDFAHRPKYIIAMQRLQAFKYELRPDSQQQRQMRRFAGSCRFVFNKALALQQERFGQGEKKLGYAELCKQLTQWKSDDSTAWLAETPSQPLQQTLKDLERAYTNFFAKRADFPRFKKKGLSDSFRYPQGFKLDQANSRLFLPKLGWLRYRNSRDVLGVIKNITVSQSSGKWYAAIQTEREVDVPVHQGTAVGLDMGIKRFVTLSDGSHKDPLNSFKTHEKALRKAQQAMSRKVRFSRNWKKAKARIQRIQAHIGSARRDYLHKISTAISKNHALVCIEDLQVRNMSRSAAGTTDTPGRNVRAKSGLNKAILDQGWGEFRRQLDYKLAWNGGHLIAVSPKNTSRTCPCCGHISADNRQTQATFECVECGFKENADLVGAINVLRAGHAQLACEVSGAIRPPAAGTHRSELSVIA

SEQ ID NO: 5084 - protein, 423 aa, unidentified
MANGVVTRTYRACIRNQQQVSDDLDSLGFAASKLWNVGRWTAHRVWDACGQIPGANALLSYLKGHERYADLHSQSSQRVLQELAEAFTGWFGKRENGDTKANPPGYRKRNGEHPRSTVTFKTAGFKHDAENGRLRLSKGKNLKDGWSDFVLCEYDPIAPPGTTIENVQQVRAVYEHGEWRLHIVCRVESDVPESPGDRVAGIDLGICNFAAVSFGDESLLYPGGALKEDEYYFAKKRAETDDPGSRKARRLDRKRTARRTHFLHTLSKHIIGECVERGVGTVVIGDLGGIRDDENGESRNWGKHGNLDLHGWAFDRFGTLLEYKGRDRGIDVVRKDERRTSKTCSCCGTEDGSQRVERGLYACDDCGVVANADSNGAENIRQKVLPSPSPDRDNGWLAQPAVRLFDRGEGVFAPREQVTEREP

SEQ ID NO: 5085 - protein, 400 aa, unidentified
MQRLQAFKFELMPTGEQQRDMRRFAGSCRFVYNKALALQKENYDAGGKFIGYVAMAKHLTAWRNGSETPWLKDSPVHPLQHALKDLERAYKNFFGKRAAFPRFKKKGTSDRFRYPDPKQIKLDQGNSRIFLPKLGWLRYRNSRGVLGALRNATVSRSAGKWFVSIQTQREVDPPVPQATRAVGIDVGVVRFATMSDGTFLVPLNSFKRHEARLRGAQRAMSRKVKFSSNWKKAKARIQRIHARIGNARRDYLHKATTAISNNHAMVCIEDLQVRNMSRSAAGNTENPGKNVRAKSGLNKSILDQGWFEFRRQLDYKVAWNGGWLIAVPSANTSRTCPACGCVSAENRLTQARFSCIECGFEENADVVGAINILARGHRVAACGELVRSGRSVKQEPAEAI

SEQ ID NO: 5086 - protein, 479 aa, unidentified
MTNYKTMQIWIKKGHRMHDYFQKMCENAKNMHNVTNFYIRQIYTGLTQEKELLPLQIEALANIDNFFPRMNDNQLLAYQKNLTKEKMKPIEKRKEIKCNLFVKPSKEKPYVDYHFLDSLFKVMMQNDYRSLPTQSSQAIMKVVFQNWKSFYASLRDFKTNPSKFKARPRIPGYSRSKEKEVSFSNQDCVIKEDKFLKFPKTKDRLNIGKLGFTNGKLKQVRVNPKYGHYVVEIIFEVPSELEVKPSKNRLMSIDLGIDNIATIVTNTGRRPILVKGENIKAINQQYNKLKAHYTGVLRHGKNPKEGQFTSKRLEKIHNKRFNKIKDLFHKASHQIERIALEEDIDTIVIGQNKDWKQKSNMGKKNNQTFVTIPHSLLIQMITYKLQRHGIQVLITEESYTSKASFLDCDNIPVYSENESKKSFSGKRIKRGIYRSKNGVIINADVNGAANIMRKVFDYAFKEMFSEVESLLRPQVLVLK

SEQ ID NO: 5087 - protein, 553 aa, unidentified
MHTISIFVDKNRMPKPASYFECQTHLAKNLRNAANFIIRNLRTGLKKTPDTRTANENEVLETVRIGIEMANEKLLKDVDRLTKQLKNLPANDPARTKIQKRIENKQKNHPSMPTSDHWMLTYETLDAVMKNTKNPDYYAMPSQVNQQILRKVLKDWKSYFEALALYRQNPERFKSQPKQPGYIKTPYTTVTFTNQVAKRSDIRGKMYITFPRCLVPVCVGKPEGSYVRTEVKPCYGGYMIYVTFQDAVKTPEAPKNPTRILGLDPGLDNFLTALTNFPSAPFILDGHWLKSINQNFNRKRAVLMSELTRGLDSTKSVKNSARLNRISKNRACQIEDFFYKAAHYILDFCLKNRVEVIVCGHNKDQKQGINIGAGNNQHFVSIPYVRFFWILTCVAAKAGIPVIETEESFTSRASLIDNDPLPVYKEGKDAEYRFSGKRISRGQYESKNGTILNADVNGAGNIIRKIYPNAFDEVKDFSYTNKTVIRVTREALCLVKHKEKHARPRRKSGMNRWLHHRRQEQKLVYFELFKASSARDKTRYIEESKQKAAQKTA

SEQ ID NO: 5088 - protein, 561 aa, unidentified
MRTFKMIISPTKNKKDAAFCQYFKTNTADSKCMYNTANFYIRNTMTGLKKSPEERTPLETEVLHYVFTGIQKANEVIGQKNMKKKFAELKLAEVGGMQSAVAAFSIVSHEPFQYPTAKKWFLSYGTLDAIFKFTDNPIYRRMNSQVNQNAIRKAVAAWQGYFESLKAYKKNPAGFTGKPKIPGYKQDEEYIAWFSKQVAKLKEEDGRYYIQFVNNPDRFEIGKASLYGDLKYVKTEVKAMYGKYYILITFDDKIAEVKVPENPKRILGLDPGVNNFLGVANNFGGAPFVMNGRAVKSENQRFNKKRAKLISSVTKGSNSKTSVKYSKQLNILSQRRESFLRDYFYKCAWYICRYAKAADVDVIVMGHNDGQKQEIDLTDNVNQDFVSIPYTKFITILKTVASKCGIAVVIREESYTSQASLLDMDDIPTYKKGKNKKYAFSGKRIHRGLYRSKNGTLLNADINGAANILRKEYPNAFDGIKDFTYLCITTISISYKDLYKNAKVCAGRPKQYKYHKSGRYTVVRHMERSHKKCEYRKLWGKGKFGWRPDKNKQDTQQEKAA

SEQ ID NO: 5089 - protein, 426 aa, unidentified
MAKQVVTRTYRARICNYSQVRNDLDSLGFAASKLWNVGRWTAQRVWDACGQIPDANALMAYLKTHERYTDLHSQSSQRVLQELAEAFTSWYGKRKNGNENANPPGYRKHNNDHPRSTITFKAAGFKHDAKNNRVRLSKGKNLKESWSDFVLCEYDIICPVGRTVENVQQVRAVYEHGEWRLHFVCRVEIDDTEPPGDGTAGIDLGICNLATVSYGNEAVLYPGGTLKEDEYYFAKKRAETDDSASREAKRLDRKRTDRRTHFLHTLSKDIVSECVDRGVGTIVVGDLSGIREDENGDARNWGCHGNLDLHGWAFDRFTTLLDYKAEVAGIEVVEKSERGTSKTCSVCGRSDDRQRVERGLYVCGCGFVGNADCNGAENIRRKVLPNLATDGGRDRDNGWLAQPAVRLFDRSEGRFAPREQVTDREP

SEQ ID NO: 5090 - protein, 483 aa, unidentified
MPQEKEYATYQIWIKEGHKLHAYFMEMCQNAKNLYNTTNFYIRQVYTALRTDQPLQPLQQEVLHTLQAHIEIMNENQLRAYQKRVQKQKEKPVKEQKDIKCNLFTLPTKEKSFLSYNFLDCLFKTMKQQDYVDLPAQINQAVMKKLYQNWKSFFASINAYKKHPSTFTGRPRIPKYIKSSMTEIVFTNQVCKLQNKYIRFPKTSIKLNIGKLFGHIENLKEVRVSPAYGKFKVEIVTEQSEPSPEYVNNHRYISIDLGINNIATITTNTGATPVLVKGNVIKSINQYYNKQKAYLLGILRHGKEPKEGPHTSKRFERLHEKRFLKIKDLFHKMSYHIVQLAIQQEISMITIGKNTSWKQNSEMGKQQNQSFCHIPHNLLIEMIKYKTNRQGIMVQVVEESYTSKASFLDNDAIPTYGEEDTPVFSGKRITRGLYRTKENLLLNADVNGSYNILKKAVPKAFADGIEGLCHQAAVSTPLVLSIS

SEQ ID NO: 5091 - protein, 484 aa, unidentified
MMTKEKEYATYQIWIKKGHKLYSYFLKMCQNAKNLYNTTNFYIRQVYTALRTNQPLQPLQQEVLHTLQTQIEIMNENQLRAYQKRVQKQKAKPVKEQKEMKCNLFTLPTKEKSFLSYNFLDCLFKTMKQQDYMNLPAQMNQAVMKKLYQNWKSFFTSMKAYQKHPSTFTGRPRIPKYMKSSMKEIVFTNQVCKLQDKYIRFPKTNIKLNIGKLFGYIENLKEVRVSPAYGKFKVEIVTGKSEPAPEHVDNNRYMSIDLGIHNIATIVTNTGTIPVLVKGNVIKSINQYYNKQRARLLGILRHGKEPKEGPHTSNRLERLHEKRFLKIKDLFHKMSYHIVQLAIQQEISVIVIGKNIAWKQNSEMGKKQNQSFCHIPHNLLIEMITYKANRQGIMVPVVEESYTSKASFLDNDAIPTYGEEDIPIFSGKRITRGLYRTKENKLLNADVNASYNILKKAVPKAFADGIEGLCHQAAVSTPLVLSIS

SEQ ID NO: 5092 - protein, 483 aa, unidentified
MTKEKEYAAYQIWIKKGHKLYSYFLEMCQNAKNLYNTTNFYIRQVYTALRTDQPLQPLQQEVLHTLQEHIEVMNENQLHAYQKRVQKQKEKPAEERKEIKCNLFTLPTKEKSFLSYNFLDCLFKTMKQQDYINLPSQVNQAVMRKLYQNWDSFFDSMKKYKKHPFTFTGRPRIPNYIKSSMREVVFTNQVCKLQDKYIRFPKTSIKLNIGKLFGRIGNLKEVRVSPAYGKFKVEIVTEQSEPAPDHVDNNRYMSIDLGINNIATITTNTGATPVLAKGNVIKSINQYYNKKKAYLLGILRHGKEPKEGPHTSKRLERLHEKRFLKIKDLFHKMSYHIVNFAVQHEISMIVIGKNTSWKQNSEMGKQQNQSFCHIPHNILIEMITYKAKRKGITVQVVEESYTSKTSFLDNDAIPTYGEEDIPEFSGKRIKRDLYRTKENKLLNADVNGSYNILKKAVPKVFADGIEGLCHQAAVSTPLVLSIP

SEQ ID NO: 5093 - protein, 388 aa, unidentified
MNRTVRLLLRPTLEQEQALLGTLVRFTDCFNAVCEAGWQDRQKNGVELHKRTYRGLKDSQPGLVSDLIIQARVKATEALASAIALENKGKKVGQPKSKLCPARYNDHTYRLSWQASTVNMSSVAGRLAILFDAPACAAKYLGHPTATADLVHRKGRFWLHVVVDVPTPEVQPTADVVGVDLGIKRPAVTSNNKFLGERRWRNLEARTFKLKRALQSKGTKSAKRHLRKLSGKQLRRRRDHDHVLSRRIVQATPAGATIALENLTGIRGRAKQRNKGGHQRRLHCWSFAQLRTFIEYKAEETGIRVVLVDPRNTSKACNRCGHVHRSNRPSQSVFRCKSCGCELNADLNAARNIRLKHLASVGMSDAGAPSSTGVSSRSPLGSGASRLL

SEQ ID NO: 5094 - protein, 483 aa, unidentified
MTKEKEYATYQIWIKKGHKLYSYFLKMCQNAKNLYNTTNFYIRQVYTALRTNQPLQPLQQEVLHTLQTQIEIMNENQLRAYQKRVQKQKAKPVKEQKEMKCNLFTLPTKEKSFLSYNFLDCLFKTMKQQDYMNLPAQMNQAVMKKLYQNWKSFFTSMKAYQKHPSTFTGRPRIPKYMKSSMKEIVFTNQVCKLQDKYIRFPKTNIKLNIGKLFGYIENLKEVRVSPAYGKFKVEIVTGKSEPAPEHVDNNRYMSIDLGIHNIATIVTNTGTIPVLVKGNVIKSINQYYNKQRARLLGILRHGKEPKEGPHTSNRLERLHEKRFLKIKDLFHKMSYHIVQLAIQQEISVIVIGKNIAWKQNSEMGKKQNQSFCHIPHNLLIEMITYKANRQGIMVPVVEESYTSKASFLDNDAIPTYGEEDIPIFSGKRITRGLYRTKENKLLNADVNASYNILKKAVPKAFADGIEGLCHQAAVSTPLVLSIS

SEQ ID NO: 5095 - protein, 415 aa, unidentified
MKLSFKFYPKLNTQQLDIIEELSYHTTRLYNIANYDCRENEVKSYVEMNKLYKANYHKDFLHSHTYQHCLKVLEKNWKSYFVSIKDYKKNPNKYLGTPRQPKFKNTNNKKNEVIFTNFAIRYQDQVLKLSLSKAMKSTFKVQSLNFNMKDIKIPIDLDELQQIKIKWDNSSKQWYLIMIYNKEEVNLTDSYNNIMSIDLGLDNLATITFEQNTNLYIIDGKYAKSKNSYYNKKIAKLTSIAMKQCKDSKHFKRTKKIVKLQTKRKNFIKDYIHKSSKKVIDLAIINKCHTIVIGDFSGVKQENNAKSFVQIPQQELVDKVKYKAQLLGIEVAMQNESYTSGCSALDLEDIGKKYYNKSRRIHRGLFVSNNGIKINADVNGSINILRKYLKCSPKSLKMIMDNGVLDTPIRLRIAY

SEQ ID NO: 5096 - protein, 425 aa, unidentified
MVKQVVTRTYRARICNYSQVRNDLDSLGFAASKLWNVGRWTAQRVWDACGQIPNANALMAYLKNHERYADLHSQSSQRVLQELGEAFESWYGKRRNGDTNANPPGYRKYNDDHPRSTITFKAAGFKHDRHNNRVRLSKGKNLKEEWSDFVLCEYDAICPSGRTIENVQQVRAVYEHGIWRLHFVCRVSIDEPKSLGDGVAGIDLGICNLATVSYGDESVLYPGGALKEDEYYFAKKRAETDDSASREARRLDTKRTDRRRHFLHTLSKDIVSESVKRGVGTIVVGDLGGIREDENGDARNWGTHGNLDLHGWAFDRFTSMLEYKAEERGIAVVTKSERNTSKTCSACGRSDDRQRVLRGLYVCECGLVANADSNGAENIRRKVLPNLACDGGDRDNGWLAQPAVRLFDCSEGRFVPREQVCNCEP

SEQ ID NO: 5097 - protein, 425 aa, unidentified
MANQVVTRTYRARICNYSQVRNDLDSFGFAASKLWNVGRWTAQRVWDACGQIPDANALMAYLKNHERYVDLHSQSSQRVLQELGEAFNSWYGKRRNGDTNANPPGYRKHNDDHPRSTITFKAAGFKHDTHNNRVRLSKGKNLKEDWSDFVLCEYDAIGPSERTIENVQQVRAVYEHGIWRLQFVCRVSIDEAESPGDGVAGIDLGICNLATVSYGDESVLYPGGALKEDEYYFAKKRAKTDNSASREARRLDTKRTDRRTHFLHTLSKDIVSECSKRGVGTIVVGDLGGIREDENGDSRNWGKHGNLDLHGWAFDRFTSMLEYKAEERGISVVTKSERNTSKTCSACGRSDDRQRVQRGLYVCECGLVANADSNGAENIRQKVLPNLATDGGDRDNGWLAQPAVRLFDCSEGRFAPREQVVNREP

SEQ ID NO: 5098 - protein, 426 aa, unidentified
MHRENAVPASSNVIDFAHRPKYIIAMQRLQAFKYELRPDSQQQRQMRRFAGSCRFVFNKALALQQERFEQGEKKLGYAELCKQLTQWKSEDSTAWLAETPSQPLQQTLKDLERAYTNFFAKRADFPRFKKKGLSDSFRYPQGFKFDQANSRLFLPKLGWLRYRNSRDVLGVIKNITVSQSSGKWYAAIQTEREVDVPVHQGTAVGLDMGIKRFVTLSDGSHKDPLNSFKTHEKALRKAQQAMSRKVRFSRNWKKAKARIQRIQTHIGSARRDYLHKISTAISKNHALVCVEDLQVRNMSKSAAGTTDTPGRNVRAKSGLNKAILDQGWGEFRRQLDYKLAWNGGHLIAVPPKNTSRTCPCCGHISADNRQTQATFECVECGFKENADLVGAINVLRAGHAQLACEVSGAIRPPAAGTHRSELSVIA

SEQ ID NO: 5099 - protein, 428 aa, unidentified
MNMHRENAVSASSNVIDFAHRPKYIIAMQRLQAFKYELRPDGQQQLRMRRFAGSCRFVFNKALALQQERFEQGEKKLGYAELCKQLTQWKSEDSTAWLAETPSQPLQQTLKDLERAYTNFFAKRADFPRFKKKGLSDSFRYPQGFKLDQANSRLFLPKLGWLRYRNSRDALGVIKNITVSQLSGKWYAAIQTEREVDVPVHQGTAVGLDMGIKRFVTLSDGSHKDPLNSFKAHEKALRKAQQAMSRKVRFSRNWKKAKARIQRIQTHIGSARRDYLHKISAAISKNHALVCVEDLQVRNMSKSAAGTTDTPGRNVRAKSGLNKAILDQGWGEFRRQLDYKLAWNGGHLIAVPPKNTSRTCPCCGHISADNRQTQATFECVECGFKENADLVGAINVLRAGHAQLACEVSGAIRPPAAGTHRSELGVIA

SEQ ID NO: 5100 - protein, 478 aa, unidentified
MYRTHQIRIKKGHRLYPYCDQLTFLAKNLYNATNFHIRQIFTAFGEEKKLQPQQREVFDLIDQHLPQMNAIKRRTVEKKRQKELKKPGEQRQEIQDAVLFEYPSAQHKWPSYAFLDSLFKVSENADYLALPGQVNQQVMRQVFQNWKAYFASLKDYQVHPHKYTGGPKPPKYAPKNGRIACVFSNQVCKVKDDKYLRFPQTKERLNIGKLGLKGSLQQVRMVPTYGEYTIELVIRKEEEKPLVELDEQHIMGIDLGVDCLAAIVDNTGSSPVIIKGQAVKSINQYYNKQRAHYYCVLRQGKGPQEGSFQSKRLQRLDQKRFFKLKDAFHKASFHIVQLALARKVSTIVIGVNKGWKQKVSLRKQDKQHFQTLPHAMLIGMIAYKAEAYGIHVHPQEESYTSKASLVDMDELPHYEKGIPAKVRFSGHRVKRGLYRTKENTSIHADVNAAGNIIRKVVPNAFAEGIEGVVSRPLMLSIV

SEQ ID NO: 5101 - protein, 452 aa, unidentified
MRATAGQRRRCFGLLRSAGDVWACVLEVNAWRRRRGDAPLVGYQQLCRELSASGPGTFAELDSTGARSVLRRFSDAWFAAAKRRTAGEPSARFPRRRRGLVPVRWYHGTFTLDGRRVRIPTAKGSAPLWVRLAREVPYPAEQVRSITLLREGGRLFLDVTAEVPVAVYPPGEQPDPGRVAGVDLGIIHPYAVAGPDGEGLLVSGRAIRAEHRMHLADTKGRRRAVARRAPKPGQKGSRRWRQYRRRARLVQGRHRRRVRQAQHEAARTVVSWAVRQRVGVLHVGDPRGVLDIPAGRRHNLRLRQWQIGRLLQVLTDKATLAGITVRLVDERGTSSTCPACHQRVPKPRGRTLSCPHCAFSGHRDLVAAASIATRIPGSGSTTPAAVVLPEVVTHRRAGRHLPGAGRSRRDPRRPPRAARGSVGPRRPAPPPGGESLAHTARIHNTHRKPGER

SEQ ID NO: 5102 - protein, 433 aa, unidentified
MWACVLEINVWRRRRDDKPLTGYQELCRELSGSGPGTFGELDTTGARSVLRRFSDAWFAAAKRRRDGDVSARFPRRRRGLVPVRWYHGTFVLDGRRVRIPTAQGAAPLWVRLAREVPYPVEQVRSVTLLCEGGRLFLDVTAEVPVAVYPPGEGPDPGRAAGVDLGIIHPYAVAGPDGEGLLVSGRAIRAEHRMHLADTKARRRSVSQRAPKPGQKGSRRWRKYRRRARLVEGRHKRRVRQAQHEAAAMVVSWAVEQRIGVLKVGDPRGVLDLDAGRRHNLRLRQWQIGRLRQVLEDKATQAGIVVDPVNERGTSSTCPACLRRVPKPRGRTLTCPHCQFTGHRDLIAAAIIATRTPGGGPTTPTAPVVLPEVVTHRRAGRHLPGAGQSRRDPRRPPAAARGSVGPRRPAPPPPGDGESLAHTARIHNRASETR

SEQ ID NO: 5103 - protein, 401 aa, unidentified
MQRLQAFKFELMPTGEQRCDMCRFAGACRFVFNKALALQQTNHEAGGKFIGYVAMAKHLTAWRNGTETPWLRDSPVHPLQHALKNLERAYKNFFAGRTAYPRFKKRGRCDSFRYPDAKQIKLDQVNNRIFLPKLGWLRYRNSRDVLGEVRNATVSLSAGKWFVSIQTEREVEQPVPQASSAVGIDLGIARFATMSDGSYLAPLNSFKRHEARLRRAQQAMSRKTKFSNNWKKAKARIQRIHARIGNARRDYLHKATTTISQNHAMVCIEDLQVRNMSRSAAGSRDAPGKNVRAKSGLNKAILDQGWFEFRRQLDYKLAWRGGWLIAVPPAAHESDVSGLRPYVSAENRQTQARFACVACGFEENADVVGAINILARGHRVAACGEPVQSGRSVKQEPAEAI

SEQ ID NO: 5104 - protein, 422 aa, unidentified
MLETTHTHRAKIANHSQVSGDLDDCGHSASKLWNVARYHTQQEWDDTGEIPSEADLKRELKDHERYSDLHSQSSQRVLEELAESFTGWFKKRKNGDTDANPPGYRKRGDKHPRSTVTWKQNGIKHDSKHNQLRLSKGFNLKSHRSDFILAEYETRPDVTVENIQQVRAVWNGDRWELHLVCKKEIPVEDAPGDNTAGIDLGIKNYLAIAYDDGDAELYPGNVLKQDKHYFTRDEYDTEGENGPSRRAFRARQKLSRRKDHFLHALAKHIVERCIDHEVGRIAIGDLSQIREDENGDSRNWGKRGNKKLHGWEFDRFTTLLEYKAEERGILVDRTSERDTSKTCSCCGRKRDANRVERGLYVCESCETTMNADVNGAVNIRRKITQSPPSGDMSNGRLARPVAYLFNQTSGRFAPSEQVGCEP

SEQ ID NO: 5105 - protein, 489 aa, unidentified
MAKENPSNYKTLQIWIKKGHRMYSYFQECCHSAKNMYNTTNFYIRQVYTGLTQEKELQPLQKEVLANIHKNIGKMNDTQLLAYQKKLEKEKLKPKEEQKEITCNLFSEPNFEKPYVDYNFLDALFKAMIQNDYRALPTQCSQSIMKGVFQNWKSFFASLKDYKKNPNKYAGPPRIPKYIRSSEKEILYTNQDCIIKNDRFLKFPKTKLKLNIGKLGFTEGKLKQVRVIPKYNEYVVELVIDVPYEQQMIEENARYMSIDLGIDNLATIVTNTGMKPVLVKGKHVKSINQYYNKMKSHFTSILRNGKQTNEGPFTSKRIEKLHQKRYLKIKDVFHKVSHHIVKLAQEEEVCKIVIGQNKGWKQETNMGKRNNQSFCHIPHNLLIQMITYKANAVGIQVVVTEESYTSKASFLDNDFIPTYGENDQNTTFSGKRIERGIYRSANKTLINADVNAAANILRKVIPNAWTNGIEGLGVKQLANVLTPLTLIVR

SEQ ID NO: 5106 - protein, 489 aa, unidentified
MAKENPSNYKTLQIWIKKGHRMYSYFQECCHNAKNMYNTTNFYIRQVYTGLTQEKELQPLQKEVLANIHKNIGKMNDTQLLAYQKKLEKEKLKPKEEQKEITCNLFSEPNFEKPYVDYNFLDALFKAMIQNDYRALPTPCSQSIMKGVFQNWKSFFASLKDYKKNPNKYAGPPRIPKYIRSSEKEILYTNQDCIIKNDRFLKFPKTKLKLNIGKLGFTEGKLKQVRVIPKYNEYVVELVIDVPYEQQMIEENARYMSIDLGIDNLATIVTNTGMKPVLVKGKHVKSINQYYNKMKSHFTSILRNGKQTNEGPFTSKRIEKLHQKRYLKIKDVFHKVSHHIVKLAQEEEVCKIVIGQNKGWKQETNMGKRNNQSFCHIPHNLLIQMITYKANAVGIQVVVTEESYTSKASFLDNDFIPTYGENDQNTTFSGKRIKRGIYRSANKTLIHADVNAAANILRKVIPNAWTNGIEGLGVKQLANVLTPLTLIVR

SEQ ID NO: 5107 - protein, 452 aa, unidentified
MRVTPGQRRRCFGLLRSAGDVWACVLEVNGWRRRRRDAPLSGYQELCRELSASGPGTFGELDSTGARSVLRRFSDSWFAAAKRRSAGDLSARFPRRRRGLVPVRWYHGTFTLDGRRVRIPTAKGTAPLWVRLARDVPYPVEQVRSVTLLCEGGRLFLDVTAEVPVAVYPPGDEPDPARVAGVDLGIIHPYAVAGPDGEGLMVSGRAIRAEHRMHLADTKARRRAVARRAPRPGQKGSRRWRQYRRRARLVEGRHRRRVRQAQHEAARSVVSWAVRQRVGVLHVGDPRGVLEIPAGRRHNLRLRQWQIGRLLQVLTDKATLAGIAVRLVDERGTSSTCPACHRRVPKPRGRTLSCPHCRFSGHRDLVAAASIATRTPGGGPTTPTAVVLPEVVEHRRAGRHLPGAGRSRRDPRRPPRAARGSVGPRRPAPPPDGESLAQQARIHNTHRKPGER

SEQ ID NO: 5108 - protein, 464 aa, unidentified
MPRVVHRTARVAVRVTPGQRRRCFGLLRSAGDVWACVLEVNGWRCRRRDAPLSGYQELCRELSASGPGTFGELDSTGARSVLRRFSDAWFAAAKRRSAGDLSARFPRRRRGLVPVRWYHGTFTLDGRRVRIPTAKGTAPLWVRLARDVPYPVEQVRSVTLLCEGGRLFLDVTAEVPVAVYPPGDEPDPARVAGVDLGIIHPYAVAGPDGEGLLVSGRAIRAEHRMHLADTKARRRAVARRAPRPGQKGSRRWRQYRRRARLVEGRHRRRVRQAQHEAARSVVSWAVRQRVGVLHVGDPRGVLEIPAGRRHNLRLRQWQIGRLLQVLTDKATLAGIPVRLVDERGTSSTCPACERRVPKPRGRTLSCPHCAFSGHRDLVAAASIATRVPGGGSTTPTAVVLPQVVEHRRAGRHLPGAGRSRRDPRRPPRAARGSVGPRRPAPPPGGESLAQWARIHNTHRKPGER

SEQ ID NO: 5109 - protein, 464 aa, unidentified
MPRVVHRTARVAVRVTAGQRRRCFGLLRSAGDVWACVLEVNGWRRRRRDAPLVGYQQLCRELSASGPGTFAELDTTGARSVLRRFSDAWFAAAKRRKAGDASARFPRRRRGLVPVRWYHGTFTLDGRRVRIPTARGGAPLWVRLAREVPYPAEQVRSITLLCEGGRLFLDVTAEVPVAVYPPGEGPDPARVAGVDLGIIHPYAVAGPAGEGLLVSGRAIRAEHRMHLADTKARRRAVARRAPKPGQKGSRRWRKYRRRARLVEGRHRRRVRQAQHEAARLVVSWAVGQRVGVLHVGDPRGVLEIPAGRRHNLRLRQWQIGRLLQVLTDKATLAGITVRLVDERGTSSICPACGRRVPKPRGRTLSCPHCAFSGHRDLVAAASIATRVPGGGSTTPTAVVLPEVVEHRRAGRHLPGAGRSQRDPRRPPRAARGSVGPRRPAPPTGGESLAQRARIHNTHRKPGER

SEQ ID NO: 5110 - protein, 472 aa, unidentified
MPRRRDPAAPRVVHRTARVAVRVTAGQRRRCFGLLRSAGDVWACVLEVNAWRRRRHDPPLVGYQQLCRELSASGPGTFADLDTTGARSVLRRFSDAWFAAAKRRKAGDASARFPRRRRGLVPVRWYHGTFTLDGRRVRIPTAKGTAPLWVRLARDVPYPAEQVRSITLLCEGGRLFLDVTAEVPVAVYPHGEGPDPGRVAGVDLGIIHPYAVAGPDGEGLLVSGRAIRAEHRMHLADTKARRRAVARRAPKPGEKGSRRWRQYRRRARLVEGRHRRRVRQAQHEAARSVVSWAVRQRVGVLHVGDPRGVLEIPAGRRHNLRLRQWQIGRLLQVLTDKATLAGISVRLVDERGTSSTCPACRRRVPKPRGRTLSCPHCAFSGHRDLVAAASIATRLPGGGPTTPTAVVLPEVVTHRRAGRHLPGAGQSRRDPRRPPRAARGSVGPRRPAPPPGGESLAQQARIHNTHRKPGER

SEQ ID NO: 5111 - protein, 323 aa, unidentified
MAKLGRTIKMRLYPDTDQAEQFLAMSQEYQRLANVVSQWIFDHAFQLSWLKINHQLYKRFRQESPLNSQMIQSVFRTVVARYKTVREQMKQHPYRYKNEENKWIQLPKDLTWLVSPIQFHRPQADLVRQSNYSFVDKMRQISITTLGKRTKLGFTNKGFEEYFAANWKFGTAKLIHNRGKWFLHIGITKEVSDFDTKNQPQIVGIDRGLRFLATAFDSEGKTLFFDGQKILRKRKKFLESRRQLQSKGTKSAKKKLKQLARRENRWMTDVNHRLAKTLVTAYGSHTLFVLEDLTNVTFNTSDFPKSLRNSHRSWSFFQLESFL

SEQ ID NO: 5112 - protein, 301 aa, unidentified
MAKLGRTIKLRLYPDADQAEQFLAMSQEYQRLANIVSQWIFDHAFQLSWLKINHQLYKQFRQESPLNSQMIQSVFRTVVARYKTVREQMKQHPYRYKNEENKWIQLPKDLTWLVNPIQFRRPQADLVRQSNYSFVSEMRQISITTLGKRTKLGFTNKGFEKYFTDDWKFGTAKLVHNRGKWFLHIGITKEVSDFSPKDNPKIVGIDRGLRFLATAFDDEGKTLFFDGQKILRKRMKFLGIRRQLQSKGSKSAKRKLKRLAQRENRWMTDVNHRLAKTLVAAYGSHTLFVLEDLTNVTFNTD

SEQ ID NO: 5113 - protein, 426 aa, unidentified
MHRENAVSASSNVIDFSHRPKYIIAMQRLQAFKYELRPDGQQQLRMRRFAGSCRFVFNKALALQQERFEQGEKKLGYAELCKQLTQWKSEDSTAWLAETPSQPLQQTLKDLERAYTNFFAKRADFPRFKKKGLSDSFRYPQGFKLDQANSRLFLPKLGWLRYRNSRDALGVIKNITVSQSSGKWYAAIQTEREVDVPVHQGTAVGLDMGIKRFVTLSDGSHKDPLNSFKAHEKALRKAQQAMSRKVRFSRNWKKAKARIQRIQTHIGSARRDYLHKISTAISKNHALVCVEDLQVRNMSKSAAGTTDTPGRNVRAKSGLNKAILDQGWGEFRRQLDYKLAWNGGHLIAVPPKNTSRTCPCCGHISADNRQTQATFECVECGFKENADLVGAINVLRAGHAQLACEVSGAIRPPAAGTHRSELGVIA

SEQ ID NO: 5114 - protein, 482 aa, unidentified
MPRRRDRDASRVVYRTARVGLRLSRAQRERCYGLLRSAGDVWACVLEVNAWRHQRRDAPLVSYQALCRELAASGPGTFGELDTTGARSVLRRFSDAWFAAAKRRRAGDVTARSPRRRRGLVPVRWYHGTFGLSGRRLRMPTAAGCPSLWLRLDREVPYPDGQIRSVTLLADAGRLWVEVTAEVAVAAYPPDAAPDPDRVAGVDLGVIHPYAVAGPGGRGLLVSGRAVRAEHRLHLADTKARRRAVAARAPKPGQRGSRRWRQYRRRTRLVEARHRRRVRQAQHEAAKTVIAWAVQHRVGTLTVGDPRGVLGLDAGRRHNLRLRQWQVGRAIAVLRDKAELAGVTVRLVDERGTSSTCPACRHRVRKPAGRTMTCTTCKLSGHRDLFAAATIATRTPGGGSTAAAPVVPTVVTHRRAGRHLPGAGPSRRDPRRHPVAAGGSVGRLRPATPPPETVMAGSRSTAPRGEEPQHEHQTGERKWSQH

SEQ ID NO: 5115 - protein, 471 aa, unidentified
MPRRRGSGAPRVVHRTARVGLRLTRAQRQRCFGLLRAAGDVWACVLEYNSWRHRRQDRPVASYQELCRLLAASGPGTFGELDSTGARSVLRRYSDAWFSAAARRRAGHGEVRYPRRRRSLMPVRWYHGTFGLSERRLRLPTSAGSPPLVVRLDRAVPYPHDAVRSVTLVFDQGRLWVEVTAELAVATYPAGLEPQRGRVAGVDLGIIHPYAVAAGDGQMLLVSGRAIRAEHRQHLADTKGRRRATAARAPKRGQRGSRRWRKTRRRARLMEGRHRRRVRQAGHEAAKTVIGWAVQHRVGTLTVGDPRGVLDLPAGRRHNLRLRQWQLGRAIAVLKDKAELAGITVYLVDERGTSSTCPVCRRRVVKPRGRTMMCRSCGFVGHRDVAAAFTIATRTPGGVTITAPEMGAVITHRRAGRHLPGAGLSRRDPRRPPAVSGSVGRLRPAPLPVGSRSLRQRLGEEPQHHRQPGER

SEQ ID NO: 5116 - protein, 452 aa, unidentified
MKRSVTVKLQPSKEQEKVLFELADLGAKVWNRINYLRRQQFFQGQIVDFNSTEKTVYKEFKREIGSATVQQIARKNAEAWRSFFSLLRKKRNGELPDWLKPKPPNYLKEDRKRKLVIVLRNDQYKIDGNKLILKGLGKFGRLEIQFKGRIHLKGKQGRLEITYDSIKRKWYAHLSLAVEEKLEGEEWIKLPRTPRGNLSAGIDLGVNNLMAVYVENGKSLLVNGRPVKSIDFYWRKKIAEYQSKLNKSGANTSRKLRKMHNKAKLQAKHYINTAIRQTVKKLYDLGVSRIVVGYPKGITRNSDKGSKQNFLLSHVWRFNYVIKRLTEVAEEYGICVVVVNEAFTSKLCPVCGKPHEGARFIRGLFKCPATGLIFNADLVGAFNILKKALKTITPNLSGLYAQRRGNWPETGPEGFEEPFSRVALMRTPKPPRQLGRGFLAGTLALQGGEEVR

SEQ ID NO: 5117 - protein, 457 aa, unidentified
MKRTVMVKLQPSKEQAKILFELADTGTKVWNRVNYLRRQQFFEGKIVDFNSTEKTVYEEFKREIGSATVQQIARKNAESWRSFFSLLRKKRNGELPNWLKPKPPNYLKENGRRKPLIVLRNDQYKIEGNKLILKGIGKFKRLEIQFKGRIHLKGKQGRLEITYDPVRRKWYAHLSFTVEEKLEGGEWVKLPRTPKGSLSAGIDLGVNNLMAVYVENGESFLVNGRPLKSIDFYWRRKIADYQSKLNKSGAKTSRKLRRMHRRSKLQAKHYLNTAVRQTMRKLYELGVSKIVVGYPKGIARNSDRSKKQNFILSHVWRFNYVIKRLTEVAEEYGIQVELVNEAFTSKLCPVCGRPHEEARFVRGLFKCPATGLVFNADLVGAFNILKKAVNTITPNPSGLYAQRRGNGGKALPEGFEELVPTGSLMRTPQTFLSMRGVNSLEPSPFRAGRRSVRNRPP

SEQ ID NO: 5118 - protein, 454 aa, unidentified
MKRTVTVKLQPSKEQAKILFELADTGAKVWNRVNYLRRQQFFQEQIVDFNTTEKTVYEEFKREIGSATVQQIARKNSEAWRSFFSLLRKKRNGELPSWLKPKPPNYLKEDGKRKPLIVLRNDQYKIEGNKLILKGLGKFKRLEIQFKGGIHLKGKQGRLEITYDTVKRKWYAHVSLTVEEKLEGVEWIKLPRTPNGDLSAGIDLGVNNLMAIYVENGESSLVNGRPLKCIDFYWRKKIADYQSKLNKSGAKTSRKLKRMHEKAKLQAKHYINTAVRQTVKKLYDLGVSRIVVGYPKGIARNSERGAKQNFLLSHVWRFNYVIKRLTEVAEEYGIQVVLVGEAFTSKTCPVCGKPHKGARFVRGLFKCPATGLVFNADLVGAFNILKKVVKTITPNLSGLYAQRRGNGGKALPEGLKSPFLLGFGETPSNLSTLELGGSSLEPPPFRAGRRSAAL

SEQ ID NO: 5119 - protein, 489 aa, unidentified
MTKENPSNYKTLQIWIKKGHRMYSYFQECCHNAKNMYNTTNFYIRQVYTGLTQEKELQPLQKEVLDHIHKNIGKMNDTQLLAYQKKLEKKKLKPTEEQKEITCNLFSEPNFEKPYVDYNFLDALFKVMIQNDYRALPTQCSQSIMKGLFQNWKSFFASLKDYKKNPNKYAGMPRIPKYIRSSEKEILYTNQDCIIKNGRFLKFPKTKLQLNIGKLGFTEGKLKQVRVIPKYNEYVVELVMDVPSEQQIIEENARYMSIDLGIDNLATIVTNTGMKPVLVKGKHVKSINQYYNKMKRHFTSVLRNGKQTNEGPFTSKRIEKLHQKRYLKIKDVFHKVSHHIVKLAQEEEVCKIVIGQNKSWKQETNMGKRNNQLFCHIPHSVLIQMITYKANAVGIQVVVTEESYTSKASFLDNDFIPTYGENDQNTTFSGKRIKRGIYRSANKTLIHADVNAAANILRKVIPNAWTNGIVGLSVKQLANVLTPLTLIVR

SEQ ID NO: 5120 - protein, 421 aa, unidentified
MAIQSVTRTHRASIRNQRQVRDGLDTLGFAASKLWNVARWTAGRVWDACGQIPDDSVLKSYLKSHERYADLNAQSSQATLEELDEAFRGWYGHRDSGNERANPPGYRKNGDEHPRSTVTFKEDGFKHDSENGYIRLSKGRNTKEHWSDFILCAYDADPDVTIENVQVVRAVFEHGEWQLHIVCRHDIEVEPPGDRTAGIDLGICNVAAVSFGDGSLLYPGGALKEDEYYFAKKRAETDDSSSREARRLDAKRTDRRTHFLHALSKHIVSECVEREVGTLVVGDLGGIRDDENDDPTDWGDQGNLDLHGWAFDRFTSILDYKAEAKGITVETVSERDTSKSCSVCGTKADSQRVERGLYVCDECGLVANADTNGAENIRQKVLSNPQREDRDNGWMAQPAVRLFDRREGVFAPREQVVDREP

SEQ ID NO: 5121 - protein, 421 aa, unidentified
MAIKTVVRTHRVSIRNQRQVRDGLDTLGFAASKLWNVARWTAGRVWDACGQIPDDSVLKSYLKSHERYADLNAQSSQATLEELDEAFKGWYGHRRNGNAKANPPGYRKNGDEHPRSTVTFKEDGFKHDARNGYIRLSKGRNTKAHWSDFILCAYDVDPDVEIENVQQVRAVYEHGEWRLHIVCRHEIEVEPPGDGTAGIDLGICNVAAVSFGDESLLYPGGALKEDEYYFGKKRAETDDSFSREARRLDAKRTDRRTHFFHALSKHIVSECVERGVGTLVVGDLGGIREDETGDPTNWGDHGNLDLHGWAFDRFTTMLDYKAEAEGIEVELVSERDTSKSCSVCGRCDDSQRVERGLYVCEECGLVANADTNGAENIRQKVLPNPSLDRDNGWMAQPAVRLFDRREGVFAPREQVTKNREP

SEQ ID NO: 5122 - protein, 424 aa, unidentified
MADSMVTRTYRARIRNHSQVRADLDSLGFAAAKLWNVGRWTVQRVWDACGQIPDANALMSYLKGHERYVDLHSQSSQRVLQELGEAFTGWYGKRDNGDTKANPPGYRKRGDQHPRSTVTFKTAGFKHDAANNRLRLSKGSNLKDGWSDFVLCEYDVIGSPETSVKNVQQVRAVHEHGEWRLHIVCRVEVDVPESSGNEVAGIDLGICNFAAVSFGGESLLYPGGALKEDEYYFAKKRAECDKSSSREARRLDHKRTDRRTHFLHTLSKTIVAECAERDVGTIVVGDLAGIREDDNGETADWGDHGNLDLHGWAFDRFTTMLDYKAEAEGISVEPVSERDTSKSCSACGRTDDSQRVERGLYVCGECGLVANADSNGAENIRQKVLPNPLREDRDNGWLAQPAVRLFDRSEGRFAPREQEPNREP

SEQ ID NO: 5123 - protein, 426 aa, unidentified
MANKVVTRTYRARVRNHSQVRDGLDSLGFAASKLWNVARYTVGRVWDACGQIPSAFDLQKYLKDHERYADLHSQSSQRVLAELGEAFTAWYGHRSNGNTKANPPGYRKHNGEHPRSTVTFKQKGFRHDAANDRIRLSKGSNLKDGWSDFILCEYDVIGPRDTTVENVQQVRAVYEHGVWRLHIVCRVEVGVAEPPGDRTAGVDLGICNVAAVSFGDESLLYPGGSLKENEYYFAKKRAECDDSLSREARRLDQKRTDRRTHFFHTLSKEIVERCAERGVGTVFVGDLGGIRDDENGDPKNWGKHGNLDLHGWAFDRFTTMLEYKAEMQGIAVETVSERDTSKTCSVCGTKADSQRVERGLYDCDECGTVANADVNGAENIRLKNESTSESTDAVDRSNGWLAQPAARLFDKTRGAFFPREQAVREP

SEQ ID NO: 5124 - protein, 441 aa, unidentified
MYMHQKDAMSSAPNVVVVARGSSHTEVMQRLQAFKYELMPTGGQRRDMRRFAGSCRFVFNKALALQKERHEQGEKKLGYVGLCKLLTEWRNGMETPWLKDAPTHPLQQALKDLERAYANFFARRADFPRFKKKGQRDSFRYPDPKQIKLDQADSRIFLPKLGWLRYRNSRDVQGTVKNVTVSSSGGKWYVSIQTEREVEQPIPQGGAVGIDMGIVRFATLSDGTFYAPLNSFKRHEDRLRRAQQAMSRKTKFSSNWRRAKARVQRIHSRIGNARRDFLHKTTTTISQNHAMVCIEDLQVRNMSRSAAGTAEAPGRNVRAKSGLNKAILDQGWFEFRRQLDYKLAWSGRYLIAVPPHNTSRTCPCCGYGSKDNRRTQVQFLCVECGFEENADLVGAINILRAGHARCACEVSDAVRSPAAGTHRSDSSEHDAGVSTVGIPRL

SEQ ID NO: 5125 - protein, 411 aa, unidentified
MQTLTAKAKVVDLSDQDALLLGLLGFVATKLWNVANHHRRSVWDETGKIPDFAQQCRELKANRWYKLLPSQSSQEILSELDDSYRSWFSLRKNADQKANPPGFRKKETLSTVTFKQKAFEMLPGHRIRLRLPKTYARREMVLEYRLPPDTALGKVQQVKLSLDPTSGDWYVHIAHRVPIEYCETGRIMSLDLGIANAVAGLVTDGFSFLVPGGELLAIDRYFQKEKAKCTKSTSNKCTRLNTKWGRQRTHYLHALTKWLVNLAEDHGVSTILVGELNGIRQDKDWGDAGNQKFHAWPFSKITNLLTYKAALAGIRVIQVSEKNTSTICPHCEKRAKTARVQRGLFLHCGQSFNADLVGAYNIVQRYLRETDQVLPDPSGVVGALARPAVNRFVWRKTTPKGREQGTFKQAA

SEQ ID NO: 5126 - protein, 389 aa, unidentified
MQKEVTCYVFEAPSNAHPYVDYNFLDCLFKETAQNDYRSLPTQTSQSIMKTVFQNWKSFFSSLKEYKKKPAKYKGRPRIPAYSRAQEKEVLFTNQDCVIKEKKFLKFPKTKERLNIGKLGAGEGKLTQVRVIPKYGQYVVELVMDIPLKKEECQEINRLMAIDLGIDNLATMVTNTGSRPVLVKGKHVKSINQYYNKMKAHYLGILRRGKQPNEGPFTSKRLEKLHQIRHQKLKDLFHKISFYIVKHAQEENIDTIIIGKNNDWKQSSTIGKCNNQSFVSIPHSLFIRMIQYKAKEQGIKVIVTEESYTSKASFLDGDEIPTYGECESKKMFSGKRIKRGLYRSKAGFIINADVNGAANILKKAFLRLKEAAIFHKETIHVWHPQSKIV

SEQ ID NO: 5127 - protein, 426 aa, unidentified
MHRENAVPASSNVIAFAHRPKYIIAMQRLQAFKYELRPDSQQQRQMRRFAGSCRFVFNKALALQQERFEQGEKKLGYAELCKQLTQWKSEDSTAWLAETPSQPLQQTLKDLERAYTNFFSKRADFPRFKKKGLSDSFRYPQGFKLDQANSRLFLPKLGWLRYRNSRDVLGVIKNITVSQSSGKWYAAIQTEREVDVPVHQGTAVGLDMGIKRFVTLSDGSHKDPLNSFKTHEKALRKAQQAMSRKVRFSRNWKKAKARIQRIQTHIGSARRDYLHKISTAISKNHALVCVEDLQVRNMSKSAAGTTDTPGRNVRAKSGLNKAILDQGWGEFRRQLDYKLAWNGGHLIAVPPKNTSRTCPCCGHISADNRQTQATFECVECGFKENADLVGAINVLRAGHAQLACEVSGAIRPPAAGTHRSELSVIA

SEQ ID NO: 5128 - protein, 471 aa, unidentified
MPRRRDSGAPRVVHRTARVGLRLTRAQRQRCFGLLRAAGDLWACVLEYNGWRHRRQDRPVASYQELCRLLAASGPGTFGELDSTGARSVLRRYSDAWFSAAARRRAGHGEVRYPRRRRSLMPVRWYHGTFGLSERRLRLPTSAGSPPLVVRLDRAVPYPHDAVRSVTLVFDQGRLWVEVTAELPVATYPAGQEPERGRVAGVDLGIIHPYAVAAGDGQMLLVSGRAIRAEHRQHLADAKGRRRATAARAPKRGQRGSRRWRKTRRRARLMEGRHRRRVRQAGHEAAKTVIGWAVQHRVGTLTVGDPRGVLDLSAGRRHNLRLRQWQLGRAIAVLKDKAELAGITVYLVDERGTSSTCPVCRRRVVKPRGRTMICRSCGFVGHRDVAAAFTIATRTPGGVTTTAPNMGAVITHRRAGRHLPGAGLSRRDPRRPPAVAGSVGRLRPAPLPVGGRSLRQRLGEEPQHHRQPGER

SEQ ID NO: 5129 - protein, 489 aa, unidentified
MTKENPSNYKTLQIWIKKGHRMYSYFQECCHNAKNMYNTTNFYIRQVYTGLTQEKELQPLQKEVLANIHKNIGKMNDTQLLAYQKKLEKEKLKPKEEQKEIKCNLFSEPNFEKPYVDYNFLDALFKAMIQNDYRALPTQCSQSIMKGLFQNWKSFFASLKDYKKNPNKYVGMPRIPKYIRSSEKEILYTNQDCIIKNSRFLKFPKTKLQLNIGKLGFTEGKLKQVRVIPKYNEYVVELVIDIPSEQQIIEENARYMSIDLGIDNLATIVTNTGMKPVLVKGKHVKSINQYYNKMKSHFTSILRNGKQTNEGPLTSKRIENLHQKCYLKIKDVFHKVSHHIVKLAQEEEVCKIVIGQNKSWKQETNMGKRNNQSFCHIPHNLLVQMITYKANAVGIQVVVTEESYTSKASFLDNDFIPTYGENDQNTTFSGKRIERGIYRSANKTLINADVNAAANILRKVIPNAWTNGIEGLGVKQLANVLTPLTLIVR

SEQ ID NO: 5130 - protein, 422 aa, unidentified
MLDTTRTYRAKIANHSQVSGDLDDCGHSASKLWNVARYHTQQEWDDTGEIPSEADLKRELKDHERYSDLHSQSSQRVLEELAESFTGWFKKRKNGDTDANPPGYRKRGDKHPRSTVTWKQNGIKHDSEHNQLRLSKGFNLKSHRSDFILAEYETRPDVTVENIQQVRAVWNGDRWELHLVCRVEIPVEDAPGDNTAGIDLGIKNYLAIAYDDGDAELYPGNALKQDKHYFTLDEYDTEGENGPSRRALRTRQKLSRRKDHFLHTLAKHVVEQCIDHEVGNIAIGDLSKIREDGNGDSRNWGKRGNKKLHGWEFDRFTRLLEYKAEEHGILVDRTSERDTSKTCSCCGRKRDANRVERGLYVCESCGATMNADVNGAVNIRRKITQSPPTGDMSNGRLARPVAYLFDQTSGRFAPSEQVGCES

SEQ ID NO: 5131 - protein, 424 aa, unidentified
MAKRTVTRTHVASIHNQQQVRDGLDSLGFAASKLWNVARWTIGRIWDETGTIPGEGALKSYLKGHERYADLNAQSSQAILEELSEAFKSWYGHRRNGNENANPPGYRKRGDDYPRSTVTFKEDGFKHDPKNGRIRLSKGRNLKAHWSDFLLCEYETRPDAEIEKVQLVRAVYEHGEWRLHIVCRHEVETSSSDDRTAGIDLGICNFATISYGDGATLYPGGALKEDLYYFAKERAKCDDSASREARRLDRKQTERRTHFLHTLSKHIVSECAERGVGTIVVGDLGGIRDDENGDVRNWGDHGNLNLHGWAFARFTSMLEYKAETEGIDVSRKSEHDTSKTCSACGTKDGNQRVERGLYVCDDCGTVANADVNGAENIRRKVLPNLATDGGRDRDTGWMAQPAVRLFDRSEGRFAPREQVVDREP

SEQ ID NO: 5132 - protein, 422 aa, unidentified
MLETTRTYRAKIVNHSQVSDDLDDCGHSASKLWNVARYHTQQEWDETGEIPSEADLKRELKDHERYSDLHSQSSQRVLEELAESFNGWFKKRKNGDTDANPPGYRKRGDNHPRSTVTWKQNGIKHDAKHNQLRLSKGFNLKNHRSDFILVEYETRPDVTVENIQQVRAVWNGDRWELHLVCKVEIPVEDAPGDNTAGIDLGITNYLAIAYDDGDAELYPGNEMKQDKHYFTRDEYKTEGENGPSKRALRARQKLSRRKDHFLHALAKHIVERCIDHDVGRIAIGDLSRIREDENGESRNWGQRGNKKLHGWEFDRFTTLLEYKAEEHGILVDRKSERDTSKTCSCCGRKRDANRVERGLYVCESCGATMNADVNGAVNIRRKITQNPSTGDMSNGRLARPVAYLFNQPSGRFAPSERGGCEP

SEQ ID NO: 5133 - protein, 482 aa, unidentified
MSGEKNYKTHQIWIKKGHRMYSYFKNSCENAKNMYNTTNFYYRQVYTGLTQDKEIQPLQKEVLTIIDKSIEKMNDVQKAAYQKKLDKENLKPKEKQKEMKFNTFETPTNDHPYVDYNFLDSLFKLIGQKDYRSLPVQSSQGIMKIAFQNWKSFFASLKEYKMNPSKFKGRPKIPGYSRSMEKEVVFSNQDCVIKQNKFLKFPKTKEQLNIGKLGLVQGELKQVRVIPKYGQYVVELVVDSPNLKEELKPNGRYMSIDLGIDNLATIVTNTGRKPLLVKGKNVKSVNQYYNKMKAYYVGILRQGKKTNEGSFTSKRLEKLHQSRGLKLKDIFHKTSYLIVKTAVEEDISVIVIGQNKDWKQEINIGKRNNQSFVHIPHNMLINMITYKAAEYGIKVEVTEESYTSKASFLDDDHIPTYKKGRKHSFSGKRMKRGLYKTKNEVLLNADVNGGANIMKKAVLRLLGETEFNMNAIQVMHPQTYVI

SEQ ID NO: 5134 - protein, 484 aa, unidentified
MTKEKEKQYKTQQIWIKKGHRMYSYFKNSCENAKNMYNTTNFYYRQVYTGLTQGKELQPLQKEVLATIENNIEKMNDSQKVAYQQKVAKEEAKPQENQKKIKCNLFEAPTKENPYVDYNFLDSLFKVITQKDYRSLPAQSSQGIMKTVFQNWKSFFASLKEYKTNPSKYKARPRIPGYSRASEKEVLFTNQDCVIKENKFLKFPKTKEQLNIGKLGVSEGKLKQVRVIPKYGQYVVELVVDVPNPKEELKTNGRYMSIDIGIDNLATIVTNTGRGPILVKGKNVKSINQYYNKIKAHYLGILRQGKKTNEGPFTSNRLEKLHQKRNLKLKDIFHKASYHIVKTAVEEDVSLIIIGQNKDWKQEVNIGKKNNQSFVNIPHKILINMITYKAAEHGIRVEVTEESYTSKASFLDHDGIPVYEKGKKHSFSGRRMKRGLYKTKNNILINADVNGAANIMKKAILQMFGEKEFNTGSVQIFHPQTLVV

SEQ ID NO: 5135 - protein, 485 aa, unidentified
MEQTLYKTYQIWIKKGHRLFSYFQIMCEHAKNLYNTSNFYYRQVYTALTSNKHPHPLQEEVLQVIHRHIGRMNDIQLQAYQKRVAKEQMKPVDERKEVKANLFTKPTNEHPYINYAFLDCLFKVSKQSDYLSLPIQSSQQVMKTMFQNWKSFFASLSDYRKNPHKYKGKPRIPNYSSSKVKEVFFTNQDCAIKNDRYLKFPKTKEQLNIGKMARIKGKLKQVRVLPKYGQFVVEVVWACSLPEPTEKEPTHFMGIDLGIDNLATVVANTGMKPVLIKGKRIKSMNQYYNKQKAYYTSILCHGKSSNQGQHTSKKLERLHLNRHKQIKDLFHKASRHIVNLALQEEVDIIVIGQNKQWKQESNIGKRNNQQFCFIPHRLLIQMIEYKAIEHGIQVVITEESYTSKASFLDLDFLPTYEKEKTYSFSGKRIKRGLYKSAKGILMNADVNGAYNMIRKVVPNAFANGIEGLNGSQSVNVSTPLVLSVQ

SEQ ID NO: 5136 - protein, 436 aa, unidentified
MKRSVTVKLQPSKEQAKILHQLADAGAKAWNRVNYLRRRQYFQEQIVDFNKTEKTVYEEFKREIGSATVQQIARKNAEAWRSFFSLLRKKRNGELPSWLKPKPPLYLKEDGRRKPLIVLRNDQYKVEGNKLIFKGLGKFKRLEVQFKGRIHLKGKQGRLEITYDPVKRKWYAHVSLTVEEKLEGEEWVSVPRTPKGSLSAGIDLGVNNLMAVYVENGESFLVNGRPLKSIDFYWRRKIAEYQSKLNKSGAKTSRKLKRMHEKAKLQAKHYINTAVRQTVRRLYELGVSKIVVGYPKGIARNSDKGKKQNFILSHVWRFNYVIKRLTEVAEEYGIRVLVVNEAFTSKVCPVCGKPHDGARFVRGLFKCPATGLIFNADLVGAFNILKKVMRTITPNLSGLYAQRRGNRGKTLLEGLKSPPLLGFNEAPQTSLPLARG

SEQ ID NO: 5137 - protein, 462 aa, unidentified
MRTARVGLRLTPAQRERCFGLLASAGDVWACVLDMNRWRRQRGLPAVVSYQELCRELSAAGPGTFGELDAQGARSVLRRYSDAWFAAAKRRKDGDASARFPRRKRRLMPVRYYHGTFTLEDQRLRLPASRGSAPLWVRLDRQVPYPVDQVRSVTLLNEGRRLFVEVTAEVPVATYEAGCEPDPDRVAGVDPGVIHPFAVAGPDGEGLVVSGRAIRAESHLHLKDTKRRRRRMAPRAPKPGQVGSRRWRKFRARQRKLEARHKRRVKQAQHEAAKTVVDWAVKRRVGTLVVGDPRGVLVLKAGRRHNQRVRDWRVGYLLRCLKDKAEQAGIRLVLVDERGTSSTCPACGRRVPKPTGRLFTCMRCGFRGHRDLVGGANIARRDPGGTITTNKFPVVITHRRAGRHLPGTGLARRDPRRRPHHGTVNGSIGRPRPAPPPGGESLAPGEDQPTQSIHDQRWLTRH

SEQ ID NO: 5138 - protein, 476 aa, unidentified
MPRRSDPDAPLVVLRTARVGLRVTAAQRERCFGLLASAGDVWACVLDMNRWQRHRGLRPLASYQELCRELSAAGPGTFGELDTTGARSVLRRYSDAWFAAAKRRAGGDSLARFPRRKRGLVPVRYYHGTFVLDGQRLRLPVGRGCAPLWVRLDRELPYPVEQVRSVTLLNEGRRLFVEVTAEVPVATYEPGCEPDPGRVAGVDPGVIHPFAVAGPGAEGLIVSGRAIRAETHLHLKDTKHRRRAVAQRAPKPGQAGSRRWRKHRARQRKIEARHKRRVKQAQHEAAKTVIGWAVKRRIGTLVVGDPRGVLDLKAGRRHNQRVRAWRVGYLLRCLKDKAEQAGIRVMLVDERGTSSTCPACGRRVPKPAGRLFTCMHCGFSGHRDLVGGANIARRRPGGPITTKNLFPVVITHRRAGRHLPGTGPARRDPRRRPHHGALAGSIGRPRPAPPPWGVARLSGEDQPTTVKHGQRSLTRH

SEQ ID NO: 5139 - protein, 422 aa, unidentified
MLETTRTYRATIVNHSQVSDDLDDCGHSASKLWNVARYHIQQEWNDTGEIPSEADLKRELKDHERYSDLHSQSSQRVLEELAESFTGWFKKRKNGDTDANPPGYRKRGDNHPRSTVTWKQHGIKHDTSKNRLRLSKGFNLKSHRSDFILCEYETRPDVTVENIQQVRAVWNGDRWELNLVCKVEIPVEDAPGDNTAGIDLGIKNYLAIAYDDGEAELYSGNVLKQDKHYFTRDEYDTEGENGPSRRALRARQKLSRRKDHFLHALSKHIVEQCIDHEVGRIAVGDLSDIREDENGDSRNWGTRRNKKLHGWEFDRFTRLLEYKAEEHGILVDRKSERDTSKTCSCCGRKREANRVERGLYVCESCGVTMNADVNGAVNIRRKITQNPPTEDMSNGRLARPVAYLFTQTSGRFAPSEQAGCKP

SEQ ID NO: 5140 - protein, 422 aa, unidentified
MLETTRTYRAKIVNHSQVSDDLDDCGHSASKLWNVARYHIQQEWDDTGEIPSEADLKRELKDHERYSDLHSQSSQRVLEELAESFTGWFKKRKNGDTDANPPGYRKRGDNHPRSTVTWKQVGIKHDSKHNQLRLSKGFNLKNHRSDFILTEYETRPDVTVENIQQVRAVWNGDRWELHLVCKVEIPVEDAPGDNTAGIDLGIKNYLAIAYDDGDAELYPGNVLKQDKHYFTRDEYDTEGENGPSRRALRARQKLSRRKDHFLHALAKHIVEQCIDHEVGRIAIGDLSKIREDENGDARNWGKRGNKKLHGWEFDRFTTLLGYKAEEHGILVDRVSERDTSKTCSCCGRKRDANRVERGLYVCGSCGVTMNADVNGAVNIRRKITQSPPTEDMSNGRLARPAVHLFNQTSGRFAPSEQVSCEP

SEQ ID NO: 5141 - protein, 491 aa, unidentified
MQKNQEQQSNYQTFQIWIKKGHRMYAYFQESCQNAKNMYNTTNFYIRQVYTGLTQEKELQPLQKEVLDIIDQYIEKMNDTQLLVHRKKLTKEKMKPKEKQKEIKCNLFSKPTKENPHVDYYFLDALFKAMLQKDYRSLPAQSSQSIMKTVFQNWHSFFASLRDYQQNPNKYTGKPRIPKYIRSVEKEVLYTNQDCVIKHHTFLKFPKTKCQLNIGKLGCAKGKLKQVRVIPKYHAYVVELVVDASSKIPSVEENERYMGIDLGIDNLATIVTNTGMKPVLVKGKQIKSINQFYNKLKSDFTSILRQGKQTNEGPYTSKRLEKLYQKRYLKIKDLFHKASHEIVKRAQEERICKIVVGQNKNWKQETDMGKKQNQTFCHIPHSVLIQMITYKAKKVGIEVIVIEESYTSKASFLDHDFIPTYGTNDKHATFSGKRIKRGMYRSAKEIFINADVNAAANILRKAFPNAWTNGIEGLGVKQLASVLTPLTLILR

SEQ ID NO: 5142 - protein, 468 aa, unidentified
MYSYFQESCQNAKNMYNTTNFYIRQVYTGLTQDKELQPLQKEVLDIISKNIKKMNDTQLLAYQKKLEKEKIKPKEKQKEVKCNLFSEPTTEKTYVDYNFLDALFKVMIQNDYRALPTQSSQSIMKNVFQNWKSFFASLKDYKKNPNKYTGRPRIPKYIRSSEKEILYTNQDCVIKNDKFLKFPKTKLQLNIGKLGFTEGNLKQVRVIPKYNEYVVELMVDVPSEQQSVEENGRYMSIDLGIDNLATIVTNTGMKPVLVKGKHVKSINQYYNKMKSHFTSVLRKGKQTKEGPFTSKRIEKLHQKRYLKIKDIFHKASHHIVKLAQEEEVCKIVIGQNKSWKQETNMGKKNNQTFCHISHSVLIQMITYKANTVGSQVIVTEESYTSKASFLDHDFIPTYGTNNQSATFSGKRMKRGMYRSAEGIEINADVNAAANILRKVVPDAWTNGIEGLGVKQLASVLTPLTLIVR

SEQ ID NO: 5143 - protein, 483 aa, unidentified
MTKEKEYITYQIWIKKGHKLHAYFMEMCQNAKNLYNTTNFYIRQVYTALRTERPLQPLQQEVLHTLQAHIEIMNENQLHAYQKRVQKQKEKPVKEQKEMKCNLFTFPTKEKSFLSYHFLDCLFKTMKQQDYMNLPAQTNQAVMKKLYQNWKSFFASIKAYQKHPSTFTGRPRIPKYIKSSMTEVVFTNQVCKLQEKYIRFPKTSIKLNIGKLFGYIENLKEVRVSPAYGKFKVEIVTEQSEPAPEDVDNNRYMSMDLGINNIATIITNTGATPVLVKGNVIKSINQYYNKKKAYFTGILRHGKESKEGPHTSKRLERLHEKRFLKIKDLFHKISYHIVQFAIQHEISMIVIGKNTSWKQNSEMGKRQNQSFCHIPHNLLIEMITYKAKRRGITVQVVEESYTSKASFLDNDDIPTYGEEDIPEFSGKRITRGLYRTRENKLLNADVNGSYNILKKAVPKAFADGIEGLCHQAAVSTPLVLNIS

SEQ ID NO: 5144 - protein, 483 aa, unidentified
MTKEREYATYQIWIKKGHKLYSYFLEMCQNAKNLYNTTNFYIRQVYTALRTNQPLQPLQQEVLDTLQTHIETMNENQLNAYQKRVQKQKEKPVKEQKEMKCNLFTLPTKEKSFLSYHFLDCLFKTMKQQDYMNLPAQTNQAVMKKLYQNWKSFFASMKAYQKHPPTFTGRPRIPKYIKSSMKEIVFTNQVCKLQEKYIRFPKTSIKLNIGKLFGYIENLKEVRISPAYGKFRVEIVTEQSEPAAEHVDNNRYMSIDLGINNIATIITNIGTKPVLVKGNVIKSINQYYNKQKAHLLGILRHGKEPKEGPHTSNRLERLHEKRFLKIKDFFHKISYRIIHFAVQHEISMIVIGKNTLWKQKSDMGKQQNQSFCHIPHNQLIEMITYKANRQGIAVQVVEESYTSKASFLDNDEIPTYGEEDIPVFSGKRIKRGLYHTKQNKLLNADVNGSYNILKKAVPKAFADGIEGLCHQAAVSTPLVLSIS

SEQ ID NO: 5145 - protein, 491 aa, unidentified
MQKNQEQQSNYQTFQIWIKKGHRMYAYFQESCQNAKNMYNTTNFYIRQVYTGLTQEKELQPLQKEVLDIIDQYIEKMNDTQLLVHRKKLTKEKMKPKEKQKEIKCNLFSKPTKENPHVDYYFLDALFKAMLQKDYRSLPAQSSQSIMKTVFQNWHSFFASLRDYQQNPNKYTGKPRIPKYIRSVEKEVLYTNQDCVIKHHTFLKFPKTKCQLNIGKLGCAKGKLKQVRVIPKYHAYVVELVVDASSKIPSVEENERYMGIDLGIDNLATIVTNTGMKPVLVKGKQIKSINQFYNKLKSDFTSILRQGKQTNEGPYTSKRLEKLYQKRYLKIKDLFHKASHEIVKRAQEERICKIVVGQNKNWKQETDMGKKQNQTFCHIPHSVLIQMITYKAKKVGIEVIVIEESYTSKASFLDHDFIPTYGTNDKHATFSGKRIKRGMYRSANGIFMNADVNAAANILRKAFPNAWTNGIEGLGVKQLANVLTPLTLILR

SEQ ID NO: 5146 - protein, 483 aa, unidentified
MTKEKEYATYQIWIKKGHKLYSYFLEMCQNAKNLYNTTNFYIRQVYTALRTDQPLQPLQQEVLHTLQAHIEIMNENQLCAYQKRMQKQKEKPVEKRKEMKCNLFTFPTKEKSFLSYHFLDCLFKTMKQQDYMNLPAQTNQAVMKKLYQNWKSFFASMKAYQKHPSTFTGRPCIPKYIKSSTKEIVFTNQVCKLQDKYIRFPKTSIKLNIGKLFGRVGNLKEVRVSPVYGKFKVEIVTEKSEPTLEHVDNRRYMSIDLGINNIATIVTNTGTNPVLVKGNVIKSINQYYNKKKAYLMGILRHGKEPKEGPHTSKRLESLHEKRSLKIKDLFHKASYHIVQLAIQQEISMIVIGKNTSWKQNSEMGKRQNQSFCYIPHNLLIEMIIYKAKRKGIAVQVVEESYTSKASFLDNDTIPTYGQENIPIFSGKRVTRGLYRTRENLLLNADVNGSYNILKKAVSKAFADEIEGLCHQAAVSTPLVLSIF

SEQ ID NO: 5147 - protein, 483 aa, unidentified
MTKEKEYATYQIWIKKGHKLYSYFLEMCQNAKNLYNTTNFYIRQVYTALRAGKSLHPLQQEVLHTLQTHIEVMNENQFHAYQKRVQKQKEKPVKEQNEMKCNLFTFPTQEKSFLSYHFLDCLFKTMKQQDYMNLPAQTNQAVMKKLYQNWKSFFASIKAYKKHPSTFTGRPRIPKYIKSSMKEIVFTNQVCKLQDKYIRFPKTSMKLNIGKLFGRIENLKEVRVSPAYGKFKVEIVAEQPESAPEHVDNNRYMSIDLGIDNIVTITTNTGAIPVLVKGNVIKSINQYYNKQKAYLLGILRRGKEPKEGPHTSKRLGRLHEKRFLKIKDLFHKMSYHIVQLAIQQENSMIVIGKNKSWKQNSDMGKQQNQSFYHIPHNLLIEMITYKAKRKGIIVQVVEESYTSKASFLDNDVIPTYGEENIPIFSGKRIKRGLYRTKENLLLNADVNGSYNILKKAVPKAFADGIEGLCHQAAVSTPLVLSIF

SEQ ID NO: 5148 - protein, 422 aa, unidentified
MLETTRTYRAKIVNHSQVSDDLDDCGHSASKLWNVARYHTQQEWDDTGEIPSEADLKRELKDHERYSDLHSQSSQRVLEELAESFNGWFKKRENGDTDANPPGYRKRGDTHPRSTVTWKQNGIKHDSKHNQIRLSKGFNLKTHRSDFILCEYETRPDVTVEDIQQVRAVWDGDRWELHLVCKVEIPTEDAPGDNTAGIDLGIKNYLAIAYDDGDAELYPGNVLKQDKHYFTRDEYDTEGENGPSRRALRARQILSRRKDHFLHALAKHIVEQCIDHEVGHIAIGDLSKIREEENGDARNWGKRGNKKLHGWEFDRFTNLLEYKAEEHGILVDRTSERDTSKTCSCCGRKRDANRVERGLYVCESCGATMNADVNGAVNIRRKITQNLPTENMSNGRLARPVVHLFNQTSGRFAPREQAGCEP

SEQ ID NO: 5149 - protein, 422 aa, unidentified
MLETTRTYRARIVNHSQVSDDLDQCGHSASKLWNVARYHTQQEWDETGEIPSEADLKRELKDHERYSDLHSQSSQRVLEELAESFNGWFKKRKNGDTDANPPGYRKRGDNHPRSTVTWKQMGIKHDSKHNQLRLSKGFNLKQHRSDFILAEYETRPDVTVENIQQVRAVWNGDRWKLHLVCKVEIPVEDAPGDNTAGIDLGIKNYLAIAYDDGDAELYPGNVLKQDKHYFTRDEYDTEGENGPSRRALRARQKLSRRKGHFLHALAKHIVRQCINHAVGRIAIGDLSKIREDENGDSRNWGKRGNKKLHGWEFDRFTRLLEYKAEENGILVDRTSERDTSKTCSCCGRKRDANRVERGLYVCESCGVTMNADVNGAVNIRRKITQNPPTRDMSNGRLARPVAYLFNQTSGHFAPSEQVGCKP

SEQ ID NO: 5150 - protein, 481 aa, unidentified
MPKENETKNKYKTHQIWIKKGHRMYGYFQTMTQHAKKMYNTTNFYIRQVYTGLTVEKQLQPLQKEVLDIIHNKLGKMNEVQLIAHQKSTEKQQAKPKEKRKEVKCNLFEKPSRENPYVDYHLLDSLFKIMGQKDYRSLPTQSSQGVMKMVFQNWKSFYASLKDYKQNPLKYKGKPRIPKYIRSMEKEVVFTNQDCVIKNDKFLKFPKTKEQLNIGKLGYCEGKLKQVRVIPQYNEYVVELVMDVPTEHKEYVDNGRYMSIDLGVDNLAAIVTNTGSQPLLVKGKNIKSVNQYYNKRKAHFLSVLRQGKQTNEGSFTSKKLEHLHQKRHLKIKDLFHKASSEMLKMALAEQTNTIIIGKNKDWKQEMSMGKRNNQSFVSIPHSLFMTMVEYKAAEHGIKVVVAEESYTSKASFLDGDEIPTYGEYEGKKQFSGIRIKRGLYRSGQGWIINADVNGAATILKKAVACVTKETVNVWNPQSKII

SEQ ID NO: 5151 - protein, 485 aa, unidentified
MEKDSPKNYKTRQIWIKKGHRLFPYFQEMTQNAKNMHNTTNFYIRQVYTGLTQDKPLQPLQIEVLSTIEDNLFKINEVQTATFYKKNEKEQSKPEEKRKEVKCNLFEKPSQEQPYVNYNFLDALFKLIGQKDYRSLPAQSSQSVMKTVFQNWKSFYASLKDYKLNPSKYKAVPKIPTYSRASKKEITFTNQNCAIKNNRFLKFPKTKEQLNIGKLGCADGRLKQVRVIPKYNQYVVELVMEVPSEALQLEDNGRFTSIDLGIDNLATIVTNTGRRPVLVKGKNVKSVNQYFNKQKAHFLGVLRQGKQPKQGFYTSKQLERLHQKRQLKIKDIFHKASTTIVKIALEEKTNTIIIGKNKDWKQQINIGKQNNQSFVSIPHNLLINMIDYKAAQYGINVVLTEESYTSKASFLDGDDIPTYAESDTKKPFSGKRIKRGLYCSGRNWLINADVNGAANILKKALYRLTKETDFNIETVNVWNPKSIVI

SEQ ID NO: 5152 - protein, 419 aa, unidentified
MPRVVHRTARVAVRVTPGQRRRCFGLLRSAGDVWACVLEVNAWRRRGGAPLVGYQRLCRELSASGPGTFGDLGTTGARSVLRRFSDAWFAAAKRRQAGDVSARFPRRRRGLVPVRWYHGTFTLDGRRVRVPTARGTSPLWVRLAREVPYPVEQVRSVTLLCEGGRLFLDVTAEVPVAVYPPGEEPDPARVAGVDLGIIHPYAVAGPDGEGLLVSGRAIRAEHRMHLADTKARRRAVARRAPKPGQKGSRRWRKYRRRARLVEGRHRRRVRQAQHEAARSVVSWAVEQRVGVLHVGDPRGVLDIDAGRRHHLRLRQWQIGRHLQVLTDKATLAGITVRLVDERGTSSTCPACRRRVPKPRGRTLSCPHCAFSGHRDLAAAASIDPHPGRRTHHPGSGCAAGGGHAPSSRPAPTRCRPVPT

SEQ ID NO: 5153 - protein, 414 aa, unidentified
MTAGQRRRCFGLLRSAGDVWACVLEVNAWRRRRRDAPLVGYRELCRELAAAGPGTFGELDTTGARSVLRQFSDAWFAAAKRRKAGDVSARFPRRRRGLVPVRWYHGTFTLDGRRARIPTAKGSPPLWVRLSREVPYPIEQVRSITLLCEGGRLFLDVTAEVPITAYLPGEEPDPGRLAGVDLGIIHPYAVAGPDGEALLVSGRAIRAEHRMHLADTKTRRRAVARRAPKPGQRGSRRWRKYRRRARLVDGRHRRRVRQAQHEAARTVITWAQQQRVGVLHVGDPRGVLDIDAGRRHNLRLRQWQIGRLLQVLTDKATLAGITVRLVDERGTSSTCPTCHRRVPKPRGRTLTCPHCTFTGHRDLVAAATIATRVPGGGPTTPPASVVLPEVVTHRRAGRHLPGAVRGGRRGSRRD

SEQ ID NO: 5154 - protein, 498 aa, unidentified
MAGPVFPGGAGFVVGTCCNRLVPRRVDPDAPRTVLRTARVGLRLAPAQRRRCFGLLVAAGDVWACVLDMNRWRRQRGLPAIVGYQALCRELSAAGPGTFGDLDTTGARSVLRRYSDAWFAAAKRRTGGDVSARFPRRKRRLMPVRYYHGTFTLTGRHLRLPVARGRPPLWVRLDRDPPYPAEQVRSVTLLNEGARLFVEVTAEVPVATYPPGHEPDPERVAGVDLGVIHPYAVAGPGGEGLLVSGRALRAEAHLHLKDAKYRRRAVARRAPRPGQAGSRRWRKYRARQRKLEARHKRRIKQAQHEAAKQVIEWAVTRRIGTLRVGDPRGVLELKAGRRHNQRLRDWRPGYLIRCLKDKAEQAGIRLELVDERGSSSTCPVCGRRVPKPVGRRFRCMHCGFSGHRDLVGGANIARRGPGDTITTDTDTEDRFPVVITHRRAGRHLPGAGPARRDPRRRPHHGTAHRSPGRPRPAPPPPAGSRSPTARINQHGHHTTNVD

SEQ ID NO: 5155 - protein, 479 aa, unidentified
MANYQTMQIWVKMNHRMYGYFKEMCQNAKNMHNTTNFYIRQVFTAFTQEKALQPLQEEVLDAIQKHMPIINDNQFVVYQKKVVKEHSKPARERKEIKCHVLKEPSRENPYVDYNFLDALFKSMAQDDYRSLPTQSSQGVMKTVFQNWKAFYGSLREYKTNPSKFKARPKIPGYSRKKEKEVLFSNQDCVIKENKFLKFPKTKERLNIGKLGFTEGRLKQVRLIPKYGHYVVELVFQVPSEQKMKASKKRYMSVDLGMDNLATIVTNTGRKPVVVKGKNIKSINQRYNQLKAHYHGILRQGKNTNEGLFTSKRLKKINYRRFNQIKDLFHKASYRIEKIALEEDIDTIIIGQNKAWKQHAKMGKRNNQSFTTIPHRLLMEMIEYKAQRHGIKVIMTEESYTSKASFLDQDEIPVYGEKTSKKAFSGKRIKRGLYQSKNGVMMNADVNGAGNIMRKIFREAFEEPFACIEMLLRPAAIILK

SEQ ID NO: 5156 - protein, 479 aa, unidentified
MTAYKTLQIWVKKGHRMHPYFQNMCQNAKNMHNTTNFYIRQIFTGLQQEKELQPLQKEVLENLQTYLPGMNANQLKAYQKRNAKEQKKIESERKEIKCHLFEMPSKDTPYISYSFLNALFQSMKQNDYQSLPIQSSQATMKTVFQNWRSFYGSLREYKKNPAKFKGRPRIPGYCRSKEKEITFSNQDCVIKENKFLKFPKTKMRLNIGKLGYTEGRIKQIRVVPKYGQYVVELVFQVPAETERKVSKNRYLAVDLGIDNLATIVTNTGKRPILVKGKNVKSINQRYNQLKAYHIGILRQGKQANEGSFTSKRLEKISRKRFLQIKDLFHKASFQIMKIALEEDIDTIIIGQNKEWKQHATMGKRNNQSFTSLPHSLLIQMITYKAEKHGIRVMLTEESYTSKASFLDNDEIPVYDQKNKNAEFSGKRIKRGLYLSKNRERFNADVNGAANIMRKVIKDAFHHSFSGIEALWRPVSLIIK

SEQ ID NO: 5157 - protein, 399 aa, unidentified
MANRTVTRTYRAKIQNHSQVRDSLDELGFAAAKLWNVARWTAGRVWDACGQIPDDGVLKSYLKGAGRYVDLHSQSSQRVLEELDEAFTGWYGHRDNGNEKANPPGYRKHNDEHPRSTVTFKQKGFKHDAKNNRLRLSKGRNLKDHRSDFVLCEYDVIGPQGITVENIHQVRAVHEHGVWQLHIVCRVEIDVPDAPGNGVAGVDLGICNFAAVSFGDEALLYPGGALKEDDYYFAKKRAECDSSTSREARRLDRKRTDRRTHFLHTLSKTIVEECADRSVGTIVVGDLAGIRKDDETGNPTNWGTHGNLDLHGWAFDRFETMLEYKGEAVGIDVRRKDERGTSKSCSACGRTDDSQRVERGLYVCDECGLVANADTNGAENIRRSSRYIVTKQFLEPIVR

SEQ ID NO: 5158 - protein, 431 aa, unidentified
MAKKVVTRTQRARICNLSQVRDDLDSLGFAASKLWNVARWTAGRVWDACGQIPGAGDLKSYLKGSGRYVDLHSQSSQRVLEELDEAFTGWYGHRDNGNEKANPPGYRKHNEQHPRSTVTFKQKGFKHDADNGRIRLSKGRNLKESRSDFVLCEYDVIGPRGTTIENVQQVRAVYEHGVWRLHIVCDVAIEASDTPGNGVAGVDLGICNVAAVSFGDESLLYPGGAFKEDEYYFLKKRARCDESTSREARRLDQRRTDRRTHFFHTLSKDIIEECVGREVGTLIVGDLGGIREDTETGEAVNWGTHGNLDLHGWPFNRLWKMLKYKGEIKGIDVVRKSERDTSRTCAVCGHEDESQRKERGLYVCEKCGTVANADCGGAENIRQRAEVPPNPSAPRSDRSNGWLAQPVVRLFDRSEGRFAPREQVAQTNREP

SEQ ID NO: 5159 - protein, 421 aa, unidentified
MAIRSITRTHRASIRNQRQVRDGLDTLGFAAAKLWNVARWTAGRVWDACGQIPDDSVLKSYLKSHERYADLNAQSSQATLEELDEAFKGWYGHRNNGNEKANPPGYRKYGDDHPRSTVTFKEDGFKHDEKNGYIRLSKGRNTKAHWSDFILCAYDADPDVAIENVQQVRAVYERGEWRLHIVCRHDIEVEPPGDRTAGVDLGICNVAAVSFGDESLLFPGGGLKEDEYYFAKQRAECDDSFSREAQRLDRKRTERRTHFLHALSKAIVAECVERGVGTLVVGDLSGIRDDENGNPTNWGDHGNLDLHGWAFDRFTTMLDYKAEAEGITVEQVSERDTSKSCSVCGRCDDSQRVERGLYVCDDCGTVANADTNGAENIRQKVLSNPQREDRDNGWMAQPAVRLFDCREGVFAPQEQVADREP

SEQ ID NO: 5160 - protein, 439 aa, unidentified
MHQEDAMSCVAKVVVVAHGPTYIIPMQRLQAFKYELMPTGEQQRDMRRFAGSCRFVFNKALAMQKARYEQGEKKLGYAGLCKQLTAWRNGLETPWLKDAPVHPLQQTLKDLERAYANFFAKRAAFPRFKKKGQSDRLRYPDPKQIKLDQANSRIFLPKLGWLRYRNSREVLGAVRNVTVSLSAGKWCVSIQTQREVEQPVPQATTAIGIDVGIVRFATMSDGSHLAPLASFKTHEVRLRRAQRAMSHKTRFSNNWKKAKARVQRIHARIGNARRDYLHKATTAISQNHAMVCIEDLQVSNMSKSAAGTVETPGKNVQAKSGLNKAILDQGWFEFRRQLDYKLQWAGGLLIAVPPHNTSRTCPQCGHVDAANRRTQAQFRCVACGLEENADVVGAINILARGHRVAASGETVQSGRSMKQEPTEATTRESSCSTVGIPCL

SEQ ID NO: 5161 - protein, 435 aa, unidentified
MKRTVRVKLQPSKEQEKTLFQLADIGAKVWNRANYLRRQQYFQGQIVDFNLTEKTVYEEFKKEIGSATVQQICRKNAEAWRSFFSLLRKKRNGELPSWLKPKPPNYLKEDGKRKPLIVLINDQYKIEGNKLILKGLGKFRRFEIQFKGRIQLKGKQGRLEITYDSVRQKWYAHMSLTVSEKLEKDEWVKLSRTPKGSLSAGIDLGVNNLMAVYVENGESFLVNGRPLKSIDFYWRRKIADYQSKLNKSGAKTSRKLRRMHEKAKLQAKHYINTAVRQTVRKLYEFGVSEIIVGYPKCIARNSEKGKKQNFLLSHVWRFNTVIKRLKEVAEEYGIQVLVVGEAFTSKTCPVCGKSHEGARFVRGLFKCPATGLIFNADLVGAFNILKKVVKTITSSLSGLTAGRGNWPEVRPEGFREPLKGFLMETLQTSLPMARG

SEQ ID NO: 5162 - protein, 382 aa, unidentified
MRRFAGACRFVFNRALALQNENHEAGNKYIPYTKMASWLLVWKSAPETQWLKESPSQPLQQSLKDLERGYKNFFQKRAAFPRFKKRGQNDAFRYPQGVKLDQPNSRISLPKLGWIRYRNSREIVGEVKNVTVSQSRGKWYVSIQTEYEVADPVHNAKSMIGLDVGVTKLATLSDGTVYPPVNSFKASQHKLAKLQRQLSRKVRFSSNWQKQKRKIQRLHSHIANIRRDYLHKVTSEISKNHAMIVIEDLKISNMSKSAKGTAEQHGRNVKAKSGLNRAILDQGWYEMRRQLEYKQLWRGGQVLAIPAAYTSQRCACCGHTAKENRLSQSRFECLECGYTENADINGARNILAAGHAVLACGGRVQSGRPLKQEPTEASQAPV

SEQ ID NO: 5163 - protein, 361 aa, unidentified
MVKLGRTIKLRLYPDTDQADQFLAMSQEYQRLANIVSQWIFDHEFQLSWLKINHYLYKEFRQESELNSQMIQSVFRTVSACYKAVREQMKQHPYRYKNEESKWIQFPRDLNWLVKSIQFRRPQADLVRQSNYSFVDGMRQISITTLGKRTKLNFTSKGFEKYFTDDWKLGTAKLIHNQGKWFLHIGITKEVSDFDTKNDPQIVGIDRGLRFLATAFDSEGKALFFDGQKILRRRKKFLEIRQQLQSKGTKSAKKKLKRLAQRENRWMTDVNHRLSKTLIALYGPHTLFVLEDLTNVTFNMNDLPKPLRNSHRSWSFFQLESFLMYKAQAIQSAVVKVSPAFTSQRCPKCGLVEKTNRHHDT

SEQ ID NO: 5164 - protein, 406 aa, unidentified
MVKLGRTIKLRLYPDVNQAEQFLAMSKEYQRLANIVSQWIFDHGFQLSWLKINHHLYKIFRQESELNSQMIQSVFRTVVARYKTVREQVRQHSYRYKNAESKWIQVPRDLTWLVKPIQFRRPQADLVRQSNYSFLDKMQKISMTTLGKRTKLSFTDKGFEKYFTDGWKLGTAKLVHNRGKWFLHIGITKEVSDFNVKDNPKIVGIDRGLRFLATAFDSEGKTLFFDGQKVLRKRKIFLEIRRQLQSKGTRSAKKKLKQLAQRENRWMTDVNHRLTKTLVTAYGSHTLFVLEDLTNVTFNTADFPKSLRNSHRSWPFFQLESFLMYKAQAIQSTVVKVSPAFTSQRCPRCGLVEKTNRHHDTHEYWCKQCQYRCNDDRLGAVNIEMLGQEWLSGVKRPKIKKLTTTG

SEQ ID NO: 5165 - protein, 296 aa, unidentified
MVKLGRTIKLRLYPDTNQAEQFLAMSKEYQRLANIVSQWIFDHDFQLSWLKINHHLYKIFRQKSELNSQMIQSIFRTVSARYKTVREQMRQQSYRYKNEEDKWVQVSRDLTWLVKPIRFRRPQADLVRQSNYSFVDGMRQISITTLGKRTKLGFTNKGFEKYFTEAWKLGTAKLVHTRDKWFLHIGITKKVSDFNPKDNPQIVGIDRGLRFLTTVFDSKGKTLFFNGQKILRRRKKFLEIRRQLQHKGTKSAKKKLKQLAQRENRWMTDVNHRLAKTLVALYGSHTLFVLEDLTNV

SEQ ID NO: 5166 - protein, 461 aa, unidentified
MRTARVGLRLTRGQRNRCFGLLRAAGDVWACILEINSWRRRRGEPPVAGYQQLCRLLTESGPGTFAELDTAGARSVLRRYSDAWFCAAARRKAGHTDVRFPRRRRALMPIRWYHGTFALDGRRLRLPTAAGCPPLWVRLDRLAPYPCETIRSVTLLFDAGRLWIDITAELPVATYPAGQQPDPDRIAGVDLGIIHPYAVSTLDGAGLLVSGRAIRAEHRMHLADTKNRRKAVAGRAPKPGQRGSRRWRKTRRRARLVEARHRRRIRQAQHEAATSVIDWAVKQRVGTLSVGDPRGVLGLPAGRRHNLRLRQWQIGRSLAILHDKAALAGIRVHLVDERGTSSTCPNCRTRITKPAGRTMRCRTCLFAGHRDLAAAFTIATRTPGGVITTPAGMPAGVVTHRRAGRHLPGAGRSRRDPRRPAAPGSVGRLRPAPPPSVGSRSSIPPGMDEDPQHTTGKPGER

SEQ ID NO: 5167 - protein, 460 aa, unidentified
MHRTARVALRLTPSQRRRCFGLLRSGGDVWACVLEINAWRRRRGDVPLTGYQELCRELAASGPGTFAGLDTTGARSVLRRFSDAWFAAAKRRKDGDLSAGFPRRRRGLVPVRWYHGTFTLDGRRVRISTARGTTPLWVRLARDLPYPLEQVRSITLLCEGGRLFLDVTAEVSVVVYPAGEEPDPGRVAGVDLGIIHPYAVAGPDGDGLLVSGRAIRAEHRMHLTDTKARRRAVARRAPKPGQKGSRRWRQYRRRARLVEGRHRRRVRQAQHEAARTVVSWAIRQRVGVLHVGDPRGVLNIAAGRRHNLRLRQWQIGRLLQVLTDKATLAGITVWLVNERGTSSTCPTCHQRVPKPRGRTLSCPHCQFSGHRDLVAAASIATRTPGGGPTTPAAVVLPLVVTHRRAGRHLPGAGQSRRDPRRPQQAARGSVGPRRPAPPPGGESLAHPARIHNTHRKPGER

SEQ ID NO: 5168 - protein, 489 aa, unidentified
MTKENPSNYKTLQIWIKKGHRMYSYFQECCHNAKNMYNTTNFYIRQVYTGLTQEKELQPLQKEVLDNIHKNIGKMNDTQLLAYQKKLEKEKLKPKEEQKEITCNLFSEPNFENPYVDYNFLDALFKAMIQNDYRALPTQCSQSIMKGLFQNWKSFFASLKDYKKNPNKYAGMPRIPKYIRSSEKEILYTNQDCIIKNSRFLKFPKTKLQLNIGKLGFTEGKLKQVRVIPKYNEYVVELVIDVPSEQQIIEENARYMSIDLGIDNLATIVTNTGMKPVLVKGKHVKSINQYYNKMKIHFTSILRNGKQTNEGPFTSKRIEKLHQKRYLKIKDVFHKVSHHIVKLAQEEEVCKIVIGQNKSWKQETSMGKRNNQSFCHIPHNLLIQMITYKANAVGIQVVVTEESYTSKASFLDNDFIPTFGENDQNTTFSGKRIERGIYRSANKTLINADVNAAANILRKVIPNAWTNGIEGLGVKQLANVLTPLTLIVR

SEQ ID NO: 5169 - protein, 489 aa, unidentified
MTKENPSNYKTLQIWIKKGHRMYSYFQECCHNAKNMYNTTNFYIRQVYTGLTQEKELQPLQKEVLDHIHKNIGKMNDTQRLAYQKKLEKEKLKPKEEQKEITCNLFSEPNFEKPYVDYNFLDALFKAMIQNDYRALPTQCSQSIMKGLFQNWESFFASLKDYKKNPNKYAGPPRIPKYIRSSEKEILYTNQDCIIKNDRFLKFPKTKLQLNIGKLGFTEGKLKQVRVIPKYNEYVVELVIDVPSEQQMIEENARYMSIDLGIDNLATIVTNTGMKPVLVKGKHVKSINQYYNKMKSHFTSVLRNGKQTNEGPFTSKRIEKLHQKRYLKIKDVFHKVSHHIVKLAQEEEVCKIVIGQNKSWKQETNMGKRNNQTFCHIPHSLLIQMITYKANAVGIQVVVTEESYTSKASFLDNDFIPTYGENDQNTTFSGKRIERGIYRSANKTLINADVNAAANILRKVIPNAWTNGIEGLGVKQLANVLTPLTLIVR

SEQ ID NO: 5170 - protein, 420 aa, unidentified
MIRTHMLPCHLPKHEADALNRESGRIYTKTLVTHYRVYRKKGTKRRHWLSRGAAERLGDYLLRDDPPLLHAHSKDAAQQGFYKAITTARANRQLGAKYPYKRKRWRTTIWKETGIRVEATETGTLLLLARARGLAPIRVRLPTAITTLPCWRVREVRLVWDRAARHYTWHVVVEDGQRPAPPAGTAVVAVDLGEVHPAACTDGTETVIIAARRVRATQQYTAKRLAALRRQQARQTKGSRRHRRLQRRKNRFLAQQRRRVRDLEHKVSRAVVAFAVERRAGTIALGDVRTVADGKRLNRNSQQKVSSWSHGRQRQYITYKAEAAGIRVVLVDEAYSSQTCPNPACTARHKPQGRVYRCPACGLRAHRDAVGAANLLSRFLYGAVGQIRPPPATKYRRPAVIIHGKRSMRSRLDTAHVARG

SEQ ID NO: 5171 - protein, 433 aa, unidentified
MIRTHSISCSLPKAEADALNRESGRLYTKTLVTHYRVYRKKGNKRRHWLSPHAAEKLGDYLLRDDPPLLHAHSKDAAQQGFYKAITTARANRHLGAKFPYKRKRWRTTIWKETGIRVEETETGTLLLLARARGLAPIRVPLPPAITRLPRWRVREVRLVWDRAARHYTWHVVVEDGQRPAPPPGTAVVAVDLGEVHPAACTDGTETVIIAARRVRATQQYTAKRLAELRRQQARKTTGSRRHRRLQRRKNRFLAQQRRRVRDLEHKVSRAVVAFAVERRAGTIALGDVRTVAEGKRLHATSQQKVSSWSHGRQRQYITYKAEAAGIRVVLVDEAYSSQTCPNPACKHRYKPQGRVYRCPACGLRAPPKGHPDAVGAANLLSRFLYGAVGQIRPPPHTKYRRPAVSAAGKRRVPACGCVVPWTRRHPKGTRARG

SEQ ID NO: 5172 - protein, 420 aa, unidentified
MIRTHMLPCHLPKHEADALNRESGRLYTKTLVTHYRVYRKKGNKRRHWLSPRAAEKLGDVLMRDDPPLLHAHSKDAAQQGFYKAITTARANRHLGAKFPYRRKRWRTTIWKETGIRVEATETGTLLLLARARGLAPIRVRLPTAITMLPCWRVREVRLVWDRAARHYTWHVVVEDGQRPAPPPGTAVVAVDLGEVHPAACTDGTETVIISARRVRATQQYTAKRLAELRRQQARKTTGSRRHCRLQRRKNRFLAQQRRRVRDLEHKVSRAVVAWAVERRAGTLALGDVRTVADGKRLNRNSQQKVSTWSHGRQRQYITYKAEAAGIRVVLVDEAYSSQTCPNPDCKHRYKPQGRVYRCPACGLRAHRDAVGAANLLSRFLYGAVGQIRPPPQTKYRRPAVIMHGKRSMRSPLDTGHVARG

SEQ ID NO: 5173 - protein, 404 aa, unidentified
MIRTHLLPCHLPKHEADALNRESGRISTKTLVTHDRVYRKKGTKRRHWLSRGAAERLGDYLLRDDPPLLHAHSKDAAQQGFYKAITTAHANRHLGAKFPYRRKRWRTTIWKETGIRVAATETGTLLLLARARGLAPIRVRLPPAITMLPCWRVREVRLVWDRAARHDTWHVVVEDGQRPAPPPGTAVVAVDLGEVHPAACTDGTETVIIAARRVRATQQYTAKRLAELRRQQARQTKGSRRHRRLQRRKNRFLAQQRRRVRDLEHTVSRAVVAFAVERQAGTIALGDVRTVADGKRLTRNSQQKVSTWSHGRQRQYITSKAEAAGIRVVLVDEASRSQTCPNPACKHRQKPQGRVTQRVPALSGLRVAGTAQRAPGCGWGGQSALALPVWSGGADSATARDQVS

SEQ ID NO: 5174 - protein, 433 aa, unidentified
MIRTHLLPCHLPKHESDALNRESGRLYTKTLVTHYRVYRKKGTKRRHWLSRGAAERLGDYLMRDDPPLLHAHSKDAAQQGFYKAITTARANRQLGAKFPYRRKRWRTTIWKETGIRVEETETGTLLLLARARGLAPIRVRLPTAITMLPCWRVREVRLVWDRAARHYAWHVVVEDGQRPAPPPGTAVVAVDLGEVHPAACTDGTETVIIAARRVRATQQYTAKRLAALRRQQDHKRRGSRRWWKLQRRKNRFLAQQRRRVRDLEHTVSRAVVAFAVERRAGTLALGDVRTVADGKRLNRKNQQKVSTWSHGRQRQYITSKAEAAGIRVVLVDEAARSQTCPNPDCKHRYKPQGRVYRCPACGLRAPPKGHPDAVGAANLLSRFLYGAVGQIRPPPQTTYRRPAVIMHGKRRVPACGCVVPWTRGHPQGTRARG

SEQ ID NO: 5175 - protein, 420 aa, unidentified
MIRTHLLPCHLPKHEADALNRESGRLYTKTLVTHYRVYRKKGTKRRHWLSPRAAEKLGDYLLRDDPPLLHAHSKDAAQQGFYKAITTAHANRHLGAKFPYRRKRWRTTIWKETGIRVEETETGTLLLLARARGLPPIRVPLPPAITRLPRWRVREVRLVWDRAARHYTWHVVVEDGQRPAPPPGTAVVAVDLGEVHPAACTDGTETVIIAARRVRATQQYTAKRLAELRRQQARKTKGSRRHRRLQRRKNRFLAQQRRRVRDLEHKVSRAVVAFAVERQAGTLALGDVRTVADGKRLNRNSQQKVSSWSHGRQRQYITYKAEAAGIRVVLVDEAYSSQTCPNPACTARHKPQGRVYRCPACGLRAHRDAVGAANLLSRFLYGAVGQIRPPPHTTYRRPAVIMHGKRSMRSPLDTGHVARG

SEQ ID NO: 5176 - protein, 400 aa, unidentified
MIRTHMLPCHLPKHEADALNRESGRIYTKTLVTHYRVYRKKGTKRRHWLSPRAAEKLGDYLLRDDPPLLHAHSKDAAQQGFYKAITTARANRQLGAKFPYRRKRWRTTIWKETGIRVEATETGTLLLLARARGLAPIRVRLPTAITMLPCWRVREVRLVWDRAARHYTWHVVVEDGQRPAPPPGTAVVAVDLGEVHPAACTDGTETVIIAARRVRATQQYTAKRLAALRRQQARKTKGSRRHRRLQRRKNRFLARQRRRVRDLEHKVSRAVVAFAVERRASTLALGDVRTVADGKRLNRKNQQKVSSWSHGRQRQYITYKAEAAGICVVLVDEAYSSQTCPNPDCKHRYKPQGRVTQRVPALSGLWVAGTPRCGWGGQSALTLPVWSGGADSATARDQVS

SEQ ID NO: 5177 - protein, 411 aa, unidentified
MIRTHLLPCHLPKHEADALNRESGRISTKTLVTHDRVYRKKGTKRRHWLSRGAAERLGDYLLRDDPPLLHAHRKDAAQQGFYNAITTAHANRQLGAKFPYRRKRWRTTIWKETGIRVAATETGTLLLLARARGLAPIRVRLPPAITMLPCWRVREVRLVWDRAARHDTWHVVVEDGQRPAPPPGTAVVAVDLGEVHPAACTDGTETVIIAARRVRATQQYTAKRLAALRRQQARQTKGSRRHRRLQRRKNRFLAQQRRRVRDLEHTVSRAVVAFAVERRAGTLALGDVRTVADGKRLNRNSQQKVSSWSHGRQRQYITYKAEAAGIRVVLVDEAYSSQTCPNPDCKHRYKPQGRVYRCPACGLRAPPKGHPDAVGAANLLSRFLYGAVGQIRPPPQTTYRRPAAFGQAEHA

SEQ ID NO: 5178 - protein, 463 aa, unidentified
MYSYFKNLCKNAKNMYNTTNFYYRQVYTGLTQDKELQPLQKEVLATIESNIEKMNEIQKAAYQQKVAKEKLKPQENQKKIKCNLFEVPTKENPYVDYNFLDSLFKVITQNDYRSLPAQSSQVIMKTVFQNWKSFFASLKEYKTNPSKYKARPRIPRYSRVSEKEVLFTNQDCVIKENKFLKFPKTKEQLNIGKLGVSEGKLKQVRVIPKYGQYVVELVVDVPNPRGELKMNGRYMSIDLGIDNLATIVTNTGRAPVLVKGKNVKSINQYYNKIKAHYLGILRQGKKTNEGPFTSKRLEKLHQKRNLKLKDIFHKASYHIVKTAVEEDVSLIIIGQNKEWKQEVNIGKKNNQSFVNIPHKMLINMITYKAAEHGIRVEVTEESYTSKASFLDQDGIPVYEKGKKHSFSGRRIKRGLYKTKNNILINADVNGAANIMKKAILQLFGEKEFHTESVQIFHPQTLVV

SEQ ID NO: 5179 - protein, 413 aa, unidentified
MKLSFKFRPNINPTQLEIIEELSYHTTKLYNIISYDLRKNGFKNYYEIEKLYKNNWHCDFLHSHTRQQMFKILEQNWKSYFASIKDFGVNPSKYKGLPRPPKFKNTERNKNEIIFTNLAIRFQDGILKLSLSKSIQKLFKVDSLNFEVSNKLQSLINWNRLQQARFNYDKVQKCWYLIVIYNKDEVENSNDNVMSIDIGLDNLATITFKNGINQYVYCGKKLKSVNSYANKRIAYLQAIEMKKYGSDKFKNTKEINRLRKYRNNYINDYLHKVSKNIIDKAIKNNVGKIVIGKLKDIKQDMNYNKSFVQIPIQRLVELITYKAKLKGIEIKLQEESYTSGCSAIDLEPVTKKYYNKSRRITRGLFKSGHGILNADINGSLNILRKSEKCIPDLVNAMRDKGNWTHPQRRRIAC

SEQ ID NO: 5180 - protein, 424 aa, unidentified
MSRTIRTFEATITNQRQVYDDLDQLGWAASKLWNVGRYYAQEQWDETGEIPDDGELKAELKSHERYTDLHSQSSQRVLEELAEAFNGWFGKRRNGDDRARPPGYRKNGDAHPRSTVSFKAAGFKHDAQFTRVRLSKGRNLKEHRSDFVLCEYETRPDVDLTEWNIQQVRAVYKRDEWRLQFVCRTTIDPDPPGDEVAGVDLGICNFAAVSFGGESVLYPGGALKEDEYYLTKQKAKCDDSSSREATRLDRKRTGRRTHFLHALSKAVVEECVERGVGTLVVGDLGGIREDDENDEPRNWGDHGNLDLHGWAFDRFTTLLDYKAAAEGIDMELVSERDTSKSCSACGQTDDDQRVERGLYVCEQCDTVANADVNGAENIRQKVLPSLATDGGDRDNGWLAQPAVRLFDRSEGSFAPREQVANREP

SEQ ID NO: 5181 - protein, 450 aa, unidentified
MTAGQRRRCFGLLRSAGDVWACVLEVNAWRRRRGDAPLAGYQELCRELAASGPGTFGELDSTGARSVLRRFSDAWFAAAKRRQTGDGAARFPRRRRGLVPVRWYHGTFTVDGRLVRIPTARGSAPLWVRLVRELPYPVEQVRSVTLLCEGGRLFLDVTAEVPVTVYPPGEGPDPARTAGVDLGIIHPYAVAGPDGAGLLVSGRAVRAEYRMHLADTKARRRAVARRAPKPGQRGSRRWRRYRRRARVVEGRHRRRVRQAQHEAARTVISWAQQQRVGVLHVGDPRSVLDIPAGRRHNLRLRQWQIGRLIQVLTDKATLAGITVHLVDERGTSSTCPACHRRIPKPRGRTLTCPHCRFSGHRDLVAAAMIATRRPGGGPTTGTTAVLPGVITHRRAGRHLPGAGQSRRDPRRPPQTARGSDGPRRPAPPPGGESLAPQGEDPQHHRKPGER

SEQ ID NO: 5182 - protein, 460 aa, unidentified
MHRTARVGLRLTPGQRRRCFGLLRSAGDVWACVLEVNAWRRRRRDVPLSGYQELCRELAASGPGTFAELDTTGARSVLRRFSDAWFAAAKRRSAGDLSARFPRRRRALLPVRWYHGTFTLDGHRVRIPTARGTSPLWIRLAREVPYPAEQVRSVTLRCEGDRLFLDVTAEVPVAVYPPGEEPDPGRLAGVDLGIIHPYAVAGPGGEGLLVSGRAIRAEHRMHLADTKSRRRAVARRAPKPGQKGSRRWRQYRRRARLVEGRHRRRVRQAQHEAARAVVSWAVRQRVGVLHVGDPRGVLDLPAGRRHNLRLRQWQIGRLLQVLTDKATLAGISVRLVDERGTSSTCPACHRRVPKPRGRTLSCPHCAFSGHRDLVAAASIATRVPGGGSTTPAAVVLPEVVTHRRAGRHLPGAGRSRRDPRRPPRAARGSVGPRRPAPPPSGESLAPKARIHDTHRKPGKR

SEQ ID NO: 5183 - protein, 476 aa, unidentified
MTPGQRRRCFGLLWSADDVWACVLEVNGWRRRRGDVPLAGYQELCRELTASGPGTFGELDTTGARSVLRRFSEAWFAAAKRRKSGDDAARFPRRRRGLVPVRWYHGTFTVDGRQVRIPSARGAAPLWVRLARDLPYPVEQVRSITLLCEGGRLFLDVTAEVPVTVYPPGQEPDPGRVAGVDLGIIHPYAVAGPDGAGLLVSGRAIRAEQRMHLADTKARHRAVARRAPKPGERGSRRWRQYPRRVRLVEGRHRRRVRQAQHEAARTVVSWARQQRVGVLHVGDPRGVLDIPAGRRHNLRLRQWQIGRLIQVLVDKAALARITVRLVDERGTSSTCPDCHRRIPKPRDRTLTCPHCRFSGHRDLVAAANIATRTPGGGPTTPTTAVTVPPGVVTRRRAGRHLPGAGRSRRDSPAARTRGARISWPAVAHPTTRWGVARPSGARIHNTPPEHPVHVSGNRTSAAECSAETTPEGGSRS

SEQ ID NO: 5184 - protein, 489 aa, unidentified
MKKENPSNYKTLQIWIKKGHRMYSYFQECCHNAKNMYNTTNFYIRQVYTGLTQEKELQPLQKEVLANIHKNIGKMNDTQLLAYQKKLEKEKLKPKEEQKEITCNLFSEPNFEKPYVDYNFLDALFKAMIQNDYRALPTQCSQSIMKGVFQNWKSFFASLKDYKKNPNKYAGMPRIPKYIRSSEKEILYTNQDCIIKNSRFLKFPKTKLQLNIGKLGLTEGKLKQVRVIPKYNEYVVELVIDVPSEQQIIEENARYMSIDLGIDNLATIVTNTGMKPVLVKGKHVKSINQYYNKMKSHFTSILRNGKQTNERPFTSKRIEKLHQKRYLKIKDVFHKVSHHIVKLAQEEEVCKIVIGQNKSWKQETNMGKRNNQSFCHIPHSLLIQMITYKANAVGIQVVVTEESYTSKASFLDNDFIPTYGENDQNTTFSGKRIERGIYRSANKTLIHADVNAAANILRKVIPNAWTNGIEGLGVKQLANVLTPLTLIVR

SEQ ID NO: 5185 - protein, 489 aa, unidentified
MKKENPSNYKTLQIWIKKGHRMYSYFQECCHNAKNMYNTTNFYIRQVYTGLTQEKELQPLQKEVLANIHKNIGKMNDTQLLAYQKKLEKEKLKPKEEQKEITCNLFSEPNFEKPYVDYNFLDALFKAMIQNDYRALPTQCSQSIMKGVFQNWKSFFASLKDYKKNPNKYAGMPRIPKYIRSSEKEILYTNQDCVIKNSRFLKFPKTKLQLNIGKLGLTEGKLKQVRVIPKYNEYVVELVIDVPSEQQIIEENARYMSIDLGIDNLATIVTNTGMKPVLVKGKHVKSINQYYNKMKSHFTSILRNGKQTNERPFTSKRIEKLHQKRYLKIKDVFHKVSHHIVKLAQEEEVCKIVIGQNKSWKQETNMGKRNNQSFCHIPHSLLIQMITYKANAVGIQVVVTEESYTSKASFLDNDFIPTYGENDQNTTFSGKRIERGIYRSANKTLIHADVNAAANILRKVIPNAWTNGIEGLGVKQLANVLTPLTLIVR

SEQ ID NO: 5186 - protein, 419 aa, unidentified
MTKENPSNYKTLQIWIKKGHRMYSYFQECCHNAKNMYNTTNFYIRQVYTGLTQEKELQPLQKEVLANIHKNIGKMNDTQLLAYQKKLEKEKLKPKEEQKEIKCNLFSEPNFEKPYVDYNFLDALFKAMIQNDYRALPAQCSQSIMKGLFQNWKSFFASLKDYKKNPNKYVGMPRIPKYIRSSEKEILYTNQDCIIKNSRFLKFPKTKLQLNIGKLGFTEGKLKQVRVIPKYNEYVVELVIDIPSEQQIIEENARYMSIDLGIDNLATIVTNTGMKPVLVKGKHVKSINQYYNKMKSHFTSILRNGKQTNEGPLTSKRIENLHQKCYLKIKDVFHKVSHHIVKLAQEEEVCKIVIGQNKSWKQETNMGKRNNQSFCHIPHNLLVQMITYKANAVGIQVVVTEESYTSKASFLDNDFIPTY

SEQ ID NO: 5187 - protein, 419 aa, unidentified
MTKENPSNYKTLQIWIKKGHRMYSYFQECCHNAKNMYNTTNFYIRQVYTGLTQEKELQPLQKEVLANIHKNIGKMNDTQLLAYQKKLEKEKLKPKEEQKEIKCNLFSEPNFEKPYVDYNFLDALFKAMIQNDYRALPTQCSQSIMKGLFQNWKSFFASLKDYKKNPNKYVGMPRIPKYIRSSEKEILYTNQDCIIKNSRFLKFPKTKLQLNIGKLGFTEGKLKQVRVIPKYNEYVVELVIDIPSEQQIIEENARYMSIDLGIDNLATIVTNTGMKPVLVKGKHVKSINQYYNKMKSHFTSILRNGKQTNEGPLTSKRIENLHQKCYLKIKDVFHKVSHHIVKLAQEEEVCKIVIGQNKSWKQETNMGKRNNQSFCHIPHNLLVQMITYKANAVGIQVVVTEESYTSKASFLDNDFIPTY

SEQ ID NO: 5188 - protein, 426 aa, unidentified
MAKQVVTRTYTASIRNQSRVQDDLDSLGFAASKLWNVGRWTCSRIWDEIGHIPNRNELTTYLKTDERYDDLHSQSSQRVLQQLAEAFNDWYGKRRNGDTRANPPGYRKHGDEHPRSTVTFKQKGFKLDTQYNRVRLSKGSNLKEYWSDFVLCTYQTRPDVDLSAVENVQRTKIVWTGDEWELHFVCKVEVDVDEAPGEKTVGVDLGINNFAALAYEDGHSELCPLACLKQDDCYFSKRIARCDDSNSDQATRLNQKKSARRTHYFHTLSKRIVQRCVDEEVGTIVVGDLSGIREDEENAESKDWGIHGNLDLHSWAFDRFTDLLEYKAEMEGITVEKVSERDTSKSCSCRGRKRDANRVERGLYVCDECETVANADVNGAENIRQKVSPSPATDGGDRSNGWLAQPSTFLFDKETGAFVPQEQVTS

SEQ ID NO: 5189 - protein, 426 aa, unidentified
MAKQVVTRTYTASIRNQSRVQDDLDSLGFAASKLWNVGRWTCSRIWDEIGHIPNRNELTTYLKTHERYDDLHSQSSQRVLQELAEAFNDWYGKRRNGDTRANPPSYRKHGDEHPRSTVTFKAAGFKLDTQYNRVRLSKGSNLKEYWSDFVLCTYQTRPDVDLSAVENVKQAKIVWTGDDWELHFVCKVEIDVDEAPGEKTVGVDLGINNFAALAYEDGHSELYPLNCLKQDDYYFSKRIALCDDSNSDQATGLNQKKSARRTHYFHTLSKRIVQRCVDEEVGTIVVGDLSGIREDEENAESKDWGIHGNLDLHSWAFDRFTDLLEYKAEMEGITVEQVSERDTSKSCSCRGRKRDANRVERGLYVCDECETVANADVNGAENIRQKVSPSSPNLSVDRSNGWLAQPSTFLFDKETGAFVPQEQVTS

SEQ ID NO: 5190 - protein, 424 aa, unidentified
MSRTIRTFEATITNQQQVRDDLDQLGWAASKLWNVGRYYAQEQWDETGEIPDDGELKAELKRHERYTDLHSQSSQRVLEELAEAFNGWFGKRRNGDDRARPPGYRKHGDSHPRSTVSFKAAGFKHDAQFTRVRLSKGRNLKEHRSDFILCEYETRPDVDLTEWDIQQVRAIYKRDEWRLQFVCRTTIDPEPPGNEVAGVDLGICNFAAVSFGGESVLYPGGALKEDEYYFTKKKAKCDDSSSREATRLDRKRTDRRTHFLHVLSKAIVEECVERGVGTLVVGDLGGIREGDENSESRNWGDHGNLDLHGWAFDRFTTLLDYKAEAEGIDVELVSERDTSKSCSACGHTDDNQRVERGLYVCEKCDTVANADVNGAENIRQKVLPSLATDGGDRDNGWLAQPAVHLFDRSEGVFAPREQVTNREP

SEQ ID NO: 5191 - protein, 426 aa, unidentified
MAKQVVTRTYTASIRNQSRVQDDLDSLGFAASKLWNVGRWTCSRIWDEIGHIPNRNELTTYLKTDERYDDLHSQSSQRVLQQLAEAFNGWYGKRRNGDTRANPPGYRKHGDEHPRSTVTFKQKGFKLDTQYNRVRLSKGSNLKEYWSDFVLCTYQTRPDVDLSAVENVQQTKIVWTGDEWELHFVCKVEVDVDEAPGEKTVGVDLGINNFAALAYEDGHSELCLLACLKQDDCYFSKRIARCDDSNSDQATRLNQKKSARRTHYFHTLSKRIVQRCVDEEVGTIVVGDLSGIREDEENAESKDWGIHGNLDLHSWAFDRFTDLLEYKAEMEGITVEQVSERDTSKSCSCRGRKRDANRVERGLYVCDECETVANADVNGAENIRQKVSPSPATDGGDRSNGWLAQPSTFLFDKETGAFVPQEQVTS

SEQ ID NO: 5192 - protein, 468 aa, unidentified
MAKQVATRTYRARIRNYGQVRDDLDSLGFAAAKLWNVGRWTAQRVWDACGQIPNANTLMSYLKTHERYADLHSQSSQRVLQELGEAFTGWFGKRDNGDTKANPPGYRKNGDEHPRPTVTFKQKGFKHDAANDRLRLSKGKNLKDGWADFVLCEYDVIGPRDTTVENVQQVRAVYEHGVWRLHIVCRVEIDVPDAPGNGVAGIDLGICNVAAVSFGDESLLYPGGALKEDDYYFAKKRAECDKSSSREARRLDRKCTDRRTHFLHTLSKAIVAECVERDVGTIAVGDLGGIREDDETGDARNWGDHGNLDLHGWAFDRFTTMLTYKAETEGIEVVSVSERNTSMSCSACGRTDDRQRVERGLYVCEECGLVANADTNGAENIRQKVLPNPSDRTDRDNGWLAQPAVHLFDRSEGAFAPREQVANREPRTLISQLRSGIPVLSERPDGREQGGEDVNQGSVHRDGARCRP

SEQ ID NO: 5193 - protein, 424 aa, unidentified
MAIKTVIRTHRASIRNQRQVRDGLDTLGFAAAKLWNVARWTAGRVWNACGQIPDDGALKSYLKSHERYADLNAQSSQRVLEELDEAFTGWYGHRRNGNEKANPPGYRKHNGEHPRATVTFKEDGFKHDSKNGYIRLSKGRNTKAHWSDFILCAYDADPDVAIENVQQVRSVYEHSEWRLHIVCKHEIETEPPGDRTAGVDLGICNVAAVSFGDESLLYPGGALKEDEYHFAKKRAECDDSASRNARRLDRKRSERRTHFYHALSKAIIAECVERRVGTLVVGDLAGIRDDEDGTPKNWGPHGNLDLHGWPFDSLPSALEYKGEAEGIDVLRKDERDTSKSCSACGRKRKANRQERGLYVCDECGLVANADTNGAENIRQKVPPNPPAREDRSNGWMAQPAVHLFDRREGVFAPREQVTKTNREP

SEQ ID NO: 5194 - protein, 478 aa, unidentified
MENYKTMQIWVKKGHRMHSYFQEMCRNAKNMHNTTNFFIRQIYTGLYSSKELHPLQKEVLEMVYQNIDKMNEVQTISCFKKMKKEMQKEKDTQKDIQCNLFELPSKKKPYVNYNFLDALFKVLAQNDYRSLPAQSSQGIMKTVFQNWKSFYGSLREYKSNPNKFKARPKIPGYSRAKEKEVSFSNQDCVIKDNKYLKFPKTKDRLNIGKLGYSEGKLKQVRVNPRYGHYVVELIFSVPSEQEMKVSKKRYMSIDLGNDNLATIVTNTGKTVLVKGKNIKSVNQRYNQLKAHFTGILRHGKNEKEGSFTSKRLERINHKRFNQIKDLFHKASHHIEKIVLEDDIDTIIIGHNKEWKQCSNMGKKNNQAFTTIPHSLLIQMIKYKAERHGIKVHVTEESYTSKASFLDNDDIPVYGESNSKKSFSGKRISRGLYRSKNGILINADVNGAANIMSKVFKHAFKEPFSDYKCLLQPTSFLIK

SEQ ID NO: 5195 - protein, 478 aa, unidentified
MENYKTMQIWVKKGHRMYSYFQEMCQNAKNMHNTTNFFIRQIYTGLYSSKELQPLQKEVLEMVYQNIDKMNEVQTISCFKKMKKEMQKEKDTQKDIQCNLFELPSKKKPYVDYNFLDALFKVLAQNDYRSLPAQSSQGVMKTVFQNWKSFYGSLREYKSNQNKFKARPKIPGYSRATEKEVSFSNQDCVIKDDKYLKFPKTKDRLNIGKLGYSEGKLKQVRVNPRYGHYVVELIFSVPSEQEMKVSKKRYMSIDLGNDNLATIVTNTGKTVLVKGKNIKSVNQRYNQLKAHFTGILRHGKNEKEGPFTSKRLERINNKRFNKIKDLFHKASHHIEKIALEDDIDTIIIGHNKEWKQCSNMGKRNNQAFTTIPHSLLIQMIKYKTERHGIKVHVNEESYTSKASFLDNDDIPVYGECGLKKSFSGKRISRGLYRSKNGILINADVNGAANIMRKVFKHAFEEPFSDFKCLLQPTSFLLK

SEQ ID NO: 5196 - protein, 460 aa, unidentified
MNPTLFYPSTGRWHGRIFHITFTTFNTIIFISTYEHSPMLKTTRTYRAKIVNHQQVSDDLDNCGHSASKLWNVARYHIQQEWDSTGEIPSEADLKRELKDHERYSDLHSQSSQRVLEELAESFNGWFKKRKNGDTDANPPGYRKRGDKHPRSTVTWKQNGIKHDSKHNQLRLSKGFNLKNHRSDFILAGYETRPDVTVEKIQQVRAVWNGDRWELHLVCKVEIPVEDAPGDDTAGIDLGISNYLTIAYDDGDAELYPGNVLKQDKHYFTRDEYDTEGENGPSRRALRARQKLSRRKDHFLHALAKHIVEQCIGHEVGRIAVGDLSKIRVDENGESRNWGRGGNKKLHGWEFDRFTTLLEYKAEEHGILVDRTSERDTSKTCSCCGRKRDANRVERGLYVCESCGATMNADVNGAVNIRRKITQNPPTEDMSNGRLARPVAYLFNQTSGRFAPSEQVGCES

SEQ ID NO: 5197 - protein, 422 aa, unidentified
MLETTRTYRAKIVNHQQVSDDLDDCGHSASKLWNAARYHAQQEWDNTGEIPSEADLKRELKDHERYSDLHSQSSQRVLEELAESFNGWFKKRKNGDTDANPPGYRKRGDNHPRSTVTWKQNGIKHDSKHNQLRLSKGFNLKNHRSDFILAEYETRPDVTVENIQQVRAVWNGDCWELHLVCKVEVPVEDAPGDNTAGIDLGIKNYLAIAYDDGDAELYPGNVLKQDKHYFTRDEYDTEGENGPSRRALRARQKLSRRKDHFLHALAKHIVEQCIDHEVGRIAIGDLSKIREDENGDARNWGKRGNKKLHGWEFDRFTTLLEYKAEEHGILVDRVSERDTSKTCSCCGRKRDANRVERGLYVCESCGVAMNADVNGAVNIRRKITQNPPTEDMSNGRLARPAVHLFNQTSGRFAPSEQVSCEP

SEQ ID NO: 5198 - protein, 422 aa, unidentified
MLKTTRTYRAKIVNHQQVSDDLDNCGHSASKLWNVARYHIQQEWDSTGEIPSEADLKRELKDHERYSDLHSQSSQRVLEELAESFNGWFKKRKNGDTDANPPGYRKRGDKHPRSTVTWKQNGIKHDSKHNQLRLSKGFNLKNHRSDFILAGYETRPDVTVEKIQQVRAVWNGDRWELHLVCKVEIPVEDAPGDDTAGIDLGISNYLTIAYDDGDAELYPGNVLKQDKHYFTRDEYDTEGENGPSRRALRARQKLSRRKDHFLHALAKHIVEQCIGHEVGRIAVGDLSKIRVDENGESRNWGRGGNKKLHGWEFDRFTTLLEYKAEEHGILVDRTSERDTSKTCSCCGRKRDANRVERGLYVCESCGATMNADVNGAVNIRRKITQNPPTEDMSNGRLARPVAYLFNQTSGRFAPSEQVGCES

SEQ ID NO: 5199 - protein, 429 aa, unidentified
MKLQPSKEQAKILSKLADAGAKVWNRVNFLRRQQYFKEQIVDFNSTEKTVYEEFKREIGSATVQQIARKNAEAWRSYFSLLRKKRNGELPNWLKPQPPNYLKEDGRRKPLIVLRNDQYKIEGNKLILKGLGKFKRLEVQFKGRIHLKGKQGRLEVTYDPVKRKWYAHLSLIVEEKLEGGEWVKLPRTPKGDLSAGIDLGVNNLMAVYVENGESFLVNGRPLKSIDFYWRRRIADYQSKLNKSGCKKSRKLRRMHEKAKLQAKHYINTAVRQTVKKLYELGVSKIVVGYPKGIARNSDKDKRQNFIISHVWRFNTVIKRLTEVAEEYGIRVLVVNEAFTSKLCPVCGKPHERARFVRGLFKCPVTGLIFNADLVGAFNILKKVVGTITPSLGGLYAQGRGNWGKTVPEGFEEPSLRVALMRTPQTSLPVG

SEQ ID NO: 5200 - protein, 408 aa, unidentified
MRLVERHIVKTNHQFYKEIDDLAWRSKNLYNYVNYLVRQSFIFDGKYLNNAAIFHLVKHHESYTALPRKVSNQVLMVLHRNWKSFFETHKAYKQNPSKFKGCPKLPKYKNKEKGRNIVIYELGAISKPLLKQGVIKLSQTEIQFPTKASNIQQVRLIPQCGQYVVEVVYLQDATPQQLNPDWVAGIDIGLDNLAALTSNKPGFKPVLVNGRPLKAINQQYNKAKARLQSQLKGNAKTSRRIQALTCKRNNRIDNYLHNASRWIINHLASAGIGTLVIGKNDQWKQEINLGTTTNQNFVSIPHARFIEQLKYKAELVAMTVLINEESYTSASSFLDLDPIPVYQEGVKHSFSGKRIKRAWYQSANGRFIHADINASLNITRKVVPAAFSLGIAGIAVCPSRITPGKVAI

SEQ ID NO: 5201 - protein, 451 aa, unidentified
MAKKKAVKVLRKQKKRETLRRFTQKQNIGRACLTAQEFRLLQRMSHSSKALRNVGLYTMKQSYLNYNKMATVKEVDTAMQADMNYWGIQSNSVQAIRRALFTEVKSFFKALEQWKKNPEKFTGRPKFPNYSHSTDKRIIEIYQVPKVDENGFWMIPMSVAFRKKFGSIKIRMPKNLRNKNISYIEIVPKQKGRFFEVHYTYEMHVSQMKKQPMTTSNALGCDLGVDRLVSCVTNTGDAFLIDGKKLKSINQYFNKTIRNLQQKNVENGLSKRIVTNKIAALWHKRERQIHGYIAQTVGLLFKKVKEFDIDTIVVGCNAGWKQNSHMGKKNNQKFVQIPFHKLIAAIENKCIKEGIRFFKQEESYTSKASFLDKDPVPVWSKDDRTQYRFSGKRITRGLYQSKAGTCIHADINGALNTLQKSQVVELDGNLKVKTPILLEVQKRKAVASRIA

SEQ ID NO: 5202 - protein, 451 aa, unidentified
MARKKAMKVLRKQKKRENMQRFTQKQNIGRACLTAKEFRLLQRMSHSSKALRNVGLYTMKQSYLNHNRMATVKEVDTAMQNDMNYSGIQSNSVQAIRRSLFTEVKSFFKALEQWKKNPEKFTGRPKFPNYSRSTDKRIIEIYQVPKVDENGYWIIPMNVAFRKKFGSIQIRMPKNLRNKKISYIEIVPKQKGRFFEVHYTYEMHVSQMKKPSTTTSNALSCDLGVDRLVSCVTHTGDAFLIDGKKLKSINQYFNKMICNLQQKNMDNGISKRIVTNKMAALWHKRERQINGYIAQTVGLLFKKVKEFDIDTIVIGYNAGWKQNSHMGKKNNQKFVQIPFQKLMAAIENKCIKEGIRFFKQEESYTSKASFLDKDPVPVWSKNDRTQYRFSGKRITRGLYQSKAGTCIHADINGAMNILKKSGVVELDDNLKVKTPILLEVQKRKAIASRIA

SEQ ID NO: 5203 - protein, 451 aa, unidentified
MTRKKAVKVLRKQKKRENMQRFTQKQNIGRACLTAKEFRLLQRMSHSSKALRNVGLYTMKQSYLNHNRMATVKEVDTAMQADTNYWGVQSNSVQAIRRALFTEVKSFFKALEQWKKNPEKFTGRPKFPNYSRSTDKRIIEIYQVPKVDENGYWMIPMNVAFRKKFGSIKIRMPKNLRNKNISYIEIVPKQKGRFFEVHYTYEMHVSQMKKPSTTTSNALSCDLGVDRLLSCVTHTGDAFLIDGKKLKSINQYFNKIICNLQQKNMDNGISKRIVTNKIAALWHKRERQINGYIAQALGLLFKKVKEFDIDTVVVGYNTGWKHKSHMGKKNNQKFVQIPFQKLIAAIENKCVKEGIRFFKQEESYTSKASFLDKDPVPVWSKDDKTQYRFSGKRITRGLYQSKAGTCIHADINGALNILKKSGVVELDENLKVKTQILLEVQKRKAIASRIA

SEQ ID NO: 5204 - protein, 434 aa, unidentified
MISLYGCQQVLIHADKELKGILEFICSEANKLSNCAVYYARQIWFKAKRYITKFELDSEMKSNRHFQTLYSQAAQQLCRSVYESFASFKQLNALYNRGELADKPRPPKYRKNGFNLVSYPKQALRLKDGQIRIPLGSQVKVWFKLDSFTLPMPSNLRFEDIKELRILPRNRCFYAEFIYKTNTVKSDVDKSRVLGIDHGLNNWLTCVSNVGTSFIIDGRHLKSLNRWYNKRVSTIKENKPQGFWSNNLADITEKRNRQIRDAINKGARIVINHCLDNRIGRVVFGWGQGIKQEIDLGKKRNQQFVQIPTARLKARIEQLCQQHGIEFVETEEANTSAASFVDGDMLPKHGEKPDSWKSSGRRVKRGLFRTAMNWCINADCNGAANIIRKVSTKLGLDLSGVSRGALTHPTRIYIWVTANKKQSNEALTRRVASS

SEQ ID NO: 5205 - protein, 457 aa, unidentified
MKYQTQKILLTGNIDDETHAYLLWCCEQSNKLYNSVLFTIRQDYFEKCNYKTWFDKNDNYRRSPRLRRVKISYAQLCKDFKDDVHYQAIGGQQGQQTIKSVVEAIKGYNKLLPMWFSGELKDTPRIPSYRKRGLYQVAFTSQNIRYEPLEGICYLPIPNSQRKELETPSIIIPSGVNFQSEDIAEVRVIPSNGKLWAEYVYKTQLLKASNLDYSQGLGIDHGVDNWLSCISTKGKSFIVNGRKIKSINQRYNRFVAKQKQGKSQEYWDEKLDQATHKRNCQMRDAVNKAARFIINYCLKHQIGNIVFGWNDGQKESINIGKTNNQNFVQIPTARLKNRIQELAESVGIVFTETEEAYSSRASFLDDDLVPKHGEKPKGYKFSGKRIKRGLYQTARGWLVNADTQAAANCLRKVATQLGINLARVGKEVLTLPKRYDLNRLTRSYRKQAEMWLQPIEA

SEQ ID NO: 5206 - protein, 408 aa, unidentified
MRLVERHIVKTNHQFYKEIDDLAWRSKNLYNYVNYLVRQSFIFDGKYLNNAAIFHLVKHHESYTALPRKVSNQVLMVLHRNWKSFFETHKAYKQNPSKFKGCPKLPKYKNKEKGRNIVIYELGAISKPLLKQGVIKLSQTEIQFLTKASNIQQVRLIPQCGQYVVEVVYLQDATPQQLNPDWVAGIDIGLDNLAALTSNKPGFKPVLVNGRPLKAINQQYNKAKARLQSQLKGNAKTSRRIQALTCKRNNRIDNYLHNASRWIINHLASAGIGTLVIGKNDQWKQEINLGTTTNQNFVSIPHARFIEQLKYKAELVAMTVLINEESYTSASSFLDLDPIPVYQEGVKHSFSGKRIKRAWYQCANGRFIHADINASLNITRKVVPAAFSLGIAGIAVCPSRITPGKVAI

SEQ ID NO: 5207 - protein, 451 aa, unidentified
MAKKKAVKVLRKQKKRETLRRFTQKQNIGRACLTAQEFRLLQRMSHSSKALRNVGLYTMKQSYLNHNKMATVKEVDTAMQADMNYWGIQSNSVQAIRRALFTEVKSFFKALEQWKKNPEKFTGRPKFPNYSHSTDKRIIEIYQVPKVDENGFWMIPMSVAFRKKFGSIQIRMPKNLRNKNISYIEIVPKQKGRFFEVHYTYEMHVSQMKQQSTTTSNALSCDLGVDRLVSCVTNTGDAFLIDGKKLKSINQYFNKMICNLQQKNMDNGISKRIVTNKMAALWHKRERQINGYIAQTVGLLFKKVKESDIDTIVVGYNAGWKQNSHMGKKNNQKFVQIPFHKLIAAIENKCIKEGIRFFKQEESYTSKASFLDKDPVPVWSKDNRAQYYFSGKRITRGLYQSKAGTCIHADINGALNTLQKSQVVELDGNLKVKTPILLEVQKRKAVASRIA

SEQ ID NO: 5208 - protein, 451 aa, unidentified
MARKKAVKVLRKQKKRENMQRFTQKQNIGRACLTAKEFRLLQRMSHSSKALRNVGLYTMKQSYLNDNKMATVKEVDTAMQADTNYWGIQSNSVQAIRRALYAEVKSFFKALEQWKKNPEKFTGRPKFPNYSRSTDKRIIEIYQVPKVDENGYWIIPMNVAFRKKFGSIQIRMPKNLRNKNISYIEIVPKQKGRFFEVHYTYEMHVSQMKKPPATTSNALSCDLGVDRLLSCVTNTGDAFLIDGKKLKSINQYFNKMICNLGQKNMDNGISKRIVTNKMAALWHKRERQINGYIAQTVGLLFKKVKEFDIDTIVIGYNAGWKQKSHMGKKNNQKFVQIPFQKLIAAIENKCVKEGIRFFKQEESYTSKASFLDKDSVPVWSKDDKTQYRFSGKRITRGLYQSKAGTCIHADINGALNTLKKSKIVELDENLKVKTPILLEVQKRKAVTSRIA

SEQ ID NO: 5209 - protein, 451 aa, unidentified
MAKKKAVKVLRKQKKRETLRRFTQKQNIGRACLTAQEFRLLQRMSHSSKALRNVGLYTMKQSYLNYNKMATVKEVDTAMQADMNYWGIQSNSVQAIRRALFTEVKSFFKALEQWKKNPEKFTGRPKFPNYSHSTDKRIIEIYQVPKVDENGFWMIPMSVAFRKKFGSIKIRMPKNLRNKNISYIEIVPKQKGRFFEVHYTYEMHVSQMKKQPMTTSNALGCDLGVDRLVSCVTNTGDAFLIDGKKLKSINQYFNKTIRNLQQKNVENGLSKRIVTNKIAALWHKRERQIHGYIAQTVGLLFKKVKEFDIDTIVVGYNAGWKQNSHMGKKNNQKFVQIPFHKLIAAIENKCIKEGIRFFKQEESYTSKASFLDKDPVPVWSKDDRTQYRFSGKRITRGLYQSKAGTCIHADINGALNTLQKSQVVELDGNLKVKTPILLEVQKRKAVASRIA

SEQ ID NO: 5210 - protein, 455 aa, unidentified
MVKTMAKKKAVKVLRKQKKRETLRRFTQKQNIGRACLTAQEFRLLQRMSHSSKALRNVGLYTMKQSYLNYNKMATVKEVDTAMQADMNYWGIQSNSVQAIRRALFTEVKSFFKALEQWKKNPEKFTGRPKFPNYSHSTDKRIIEIYQVPKVDENGFWMIPMSVAFRKKFGSIKIRMPKNLRNKNISYIEIVPKQKGRFFEVHYTYEMHVSQMKKQPMTTSNALGCDLGVDRLVSCVTNTGDAFLIDGKKLKSINQYFNKTIRNLQQKNVENGLSKRIVTNKIAALWHKRERQIHGYIAQTVGLLFKKVKEFDIDTIVVGCNAGWKQNSHMGKKNNQKFVQIPFHKLIAAIENKCIKEGIRFFKQEESYTSKASFLDKDPVPVWSKDDRTQYRFSGKRITRGLYQSKAGTCIHADINGALNTLQKSQVVELDGNLKVKTPILLEVQKRKAVASRIA

SEQ ID NO: 5211 - protein, 455 aa, unidentified
MVKTMAKKKAVKVLRKQKKRETLRRFTQKQNIGRACLTAQEFRLLQRMSHSSKALRNVGLYTMKQSYLNHNKMATVKEVDIAMQADMNYWGIQSNSLQAIRRALFTEVKSFFKALEKWKKNPEKFTGRPKFPNYSHSTDKRIIEIYQVPKVDENGFWMIPMSVAFRKKFGSIKIRMPKNLRNKNISYIEIVPKQKGRFFEVHYTYEMHVSQMKKQPMTTSNALGCDLGVDRLVSCVTNTGDAFLIDGKKLKSINQYFNKTIRNLQQKNVENGLSKRIVTNKIAALWHKRERQIHGYIAQTVGLLFKKVKEFDIDTIVVGYNAGWKQNSHMGKKNNQKFVQIPFHKLIAAIENKCIKEGIRFFKQEESYTSKASFLDKDPVPVWSKDDRTQYRFSGKRITRGLYQSKAGTCIHADINGALNTLQKSQVVELDGNLKVKTPILLEVQKRKAVASRIA

SEQ ID NO: 5212 - protein, 451 aa, unidentified
MTRKKAVKVLRKQKKRENMQRFTQKQNIGRACLTAKEFRLLQRMSHSSKALRNVGLYTMKQSYLNHNRMATVKEVDTAMQADMNYPGVQSNSVQAIRRALFTEVKSFFKALEQWKKNPEKFTGRPKFPNYSRSTDKRIIEIYQVPKVDENGYWIIPMNVAFRKKFGSIKIRMPKNLRNKNISYIEIVPKQKGRFFEVHYTYEMHVSQMKKQPTTTSNALSCDLGVDRLVSCVTNTGDTFLIDGKKLKSINQYFNKMICNLQQKNMDNGISKRIVTNKIAALWHKRERQINGYIAQTVGLLFKKVKEFDIDTIVVGYNAGWKRNSHMGKKNNQKFVQIPFQKLIAAIENKCVKEGIRFFKQEESYTSKASFLDKDPVPVWSKDDKTQYHFSGKRITRGLYQSKAGTCIHADMNGALNILKKSGVVELDDNLKVKTPILLEVQKRKAVTSRIA

SEQ ID NO: 5213 - protein, 451 aa, unidentified
MARKKVVKVLRKQKKRETMQRFTQKQNIGRACLTAKEFRLLQRMSHSSKALRNVGLYTMKQSYLNHNRMATVKEVDTAMQADMNYPGVQSNSVQAIRRSLFTEVKSFFKALEQWKKHPEKFTGRPKFPNYSRSTDKRIIEIYQVPKVDENGYWIIPMNVAFRKKFGSIKIRMPKNLRNKNISYIEIVPKQKGRFFEVHYTYEMHISQMKKQSTTTSNALSCDLGVDRLVSCVTNTGDAFLIDGKKLKSINQYFNKIIRNLQQKNIENGLSKRVVTNRMAALWHKRERQINGYISQTVGLLFKKVKAYNIDTIVVGYNAGWKQKSDMGKKNNQTFVQIPFHKLMAAIENKCVKEGIRFVKQEESYTSKASFLDKDPVPVWSKDDRTQYRFSGKRITRGLYQSKAGTCIHADMNGALNTLKKSGVVELDENLKVKTPILLEVQKRKAIASRIA

SEQ ID NO: 5214 - protein, 409 aa, unidentified
MTLTERHIIRPTHPIFKRIKDFCHLSKNLYNYANFILREHYFAGFKLPTAYDLINRFVKESQRDYKALPAQSAQQVLMLLSQNWKSYLKALKAYKLKPSSFLARPKIPKFKPKDGVSIGVLTNQQTSFTKGRMTKIKFPKKANLKRLITKINPQTSRLKQVRLIPKTTCFIVEVVYEQTTHKLPQTHGIGIMGIDLGLNNFVTAIDNQSSPFIIKGGGVKSVNQWFNKLKAHYQAKAKTSNKRFWTKRLGKLALWRECKVNDFMHKASAYVVGHCLKKGISTIVIGKNDGWKQELKLGKRTNQNFTNIPYESFIEKLAYKSTLVGITLHTTEERFTSKCDHLANEPMQHHEQYLGKRVKRGLFKSSIGKSLNADINGAIGILRKVFPDAVKTLRDSGVVFTPVKISLAF

SEQ ID NO: 5215 - protein, 409 aa, unidentified
MTLTERHIIRPTHPIFKRIKDFCHLSKNLYNYANFILREHYFAGFKLPTAYDLINRFVKESQRDYKALPAQSAQQVLMLLSQNWKSYLKALKAYKLKPSSFLARPKIPKFKPKDGVSIGVLTNQQTSFTKGRMTKIKFPKKANLKRLITKINPQTSRLKQVRLIPKTTCFIVEVVYEQTTHKLPQTHGIGIMGIDLGLNNFVTAIDNQSSPFIIKGGGVKSVNQWFNKLKAHYQAKAKTSNKRFWTKRLGKLALWRECKVNDFMHKASAYVVGHCLKKGISTIVIGKNDGWKQELKLGKRTNQNFTNIPYESFIEKLAYKCALVGITLHTTEERFTSKCDHLANEPMQHHEQYLGKRVKRGLFKSSIGKSLNADINGAIGILRKVFPDAVKTLRDSGVVFTPVKISLAF

SEQ ID NO: 5216 - protein, 455 aa, unidentified
MVKTMAKKKAVKVLRKQKKRETLRRFTQKQNIGRAYLTAQEFRLLQRMSHSSKALRNVGLYTMKQSYLNHNKMATVKEVDTAMQADMNYWGIQSNSVQAIRRALFTEVKSFFKALEQWKKNPEKFTGRPKFPNYSHSTDKRIIEIYQVPKVDENGFWMIPMSVAFRKKLGSIKIRMPKNLRNKKISYIEIVPKQKGRFFEVHYTYEMHVSQMKQQSTTTSNALSCDLGVDRLVSCVTNTGDAFLIDGKKLKSINQYFNKMICNLQQKNMDNGISKRIVTNKMAALWHKRERQINGYIAQTVGLLFKKVKESDIDTIVVGDNAGWKQNSHMGKKNNQKFVQIPFHKLIAAIENKCIKEGIRFFKQEESYTSKASFLDKDPVPVWSKDNRAQYYFSGKRITRGLYQSKAGTCIHADINGALNTLQKSQVVELDGNLKVKTPILLEVQKRKAVASRIA

SEQ ID NO: 5217 - protein, 405 aa, unidentified
MRLVERHIIKKNHRFYAEIDRLCFLSKNLYNYANYLVRQSFIFENTYRNYHDIQKTLQSQLDYQAMPAKVSQQVLMILDRNWISFKESNLAYKETPSKFKARPRLPGYKHKVKGRNVVVYTAQAINKKQLKQGIINPSQTAIYLKTKVDTSKIKQFRLVPRLNHYVIEVIYEADKQQYQLEENNYASIDIGLNNLATLTFNQAGIKPLLINGKPLKSINQYYNKVKSDLQSLLGENQSSHKLKKLCNKREFKINDYLHKASRLIIDTLSNQKIGTLIIGHNPDWKQKINLGKRNNQNFVSIPYNKLIGMLSYKADMVGIKVIITEESYTSKASFLDNDPLPIYQKGQKNKVTFSGKKVNRGLYRTGKRKLINADVNGSLNIMRKAVPNAFSYGIEEPVRWAGSPT

SEQ ID NO: 5218 - protein, 431 aa, unidentified
MYGCQQVLIHADKELKGILEFICSEANKLSNCAVYYARQIWFKAKRYITKFELDSEMKSNRHFQTLYSQAAQQLCRSVYESFASFKQLNALYNRGELADKPRPPKYRKNGFNLVSYPKQALRLKDGQIRIPLGSQVKVWFKLDSFTLPMPSNLRFEDIKELRILPRNRCFYAEFIYKTNTVKSDVDKSRVLGIDHGLNNWLTCVSNVGTSFIIDGRHLKSLNRWYNKRVSTIKENKPQGFWSNNLADITEKRNRQIRDAINKGARIVINHCLDNRIGRVVFGWGQGIKQEIDLGKKRNQQFVQIPTARLKARIEQLCQQHGIEFVETEEANTSAASFVDGDMLPKHGEKPDSWKSSGRRVKRGLFRTAMNWCINADCNGAANIIRKVSTKLGLDLSGVSRGALTHPTRIYIWVTANKKQSNEALTRRVASS

SEQ ID NO: 5219 - protein, 409 aa, unidentified
MTLTERHIIRPTHPIFKRIKDFCHLSKNLYNYANFILREHYFAGFKLPTAYDLINRFVKESQRDYKALPAQSAQQVLMLLSQNWKSYLKALKAYKLKPSSFLARPKIPKFKPKDGVSIGVLTNQQTSFTKGRMTKIKFPKKANLKRLITKINPQTSRLKQVRLIPKTTCFIVEVVYEQTTHKLPQTHGVGIMGIDLGLNNFVTAIDNQSSPFIIKGGGVKSVNQWFNKLKAHYQAKAKTSNKHFWTKRLGKLALWRECKVNDFMHNASAYVVGHCLKKGISTIVIGKNDGWKQKLKLGKRTNQNFTNIPYESFIEKLAYKCALVGITLHTTEERFTSKCDHLANEPMQHHEQYLGKRVKRGLFKSSIGKSLNADINGAIGILRKVFPDAVKTLRDSGVVFTPVKISLAF

SEQ ID NO: 5220 - protein, 418 aa, unidentified
MKLVERHIISQNHPLWSEIDHYAFLSKNLFNLANYHYRQYFFENSQKLSFNQLYHLVSKTSDYLALPTKVSKQIIRRLEQAWVSYFAAFKAWKKHPEKFLGKPKIIKYKDKTKGRNLLIYSQESIYKKPLKEGICHLSMSDLKIPTSRREIIEVRIVPKSSCYVIEIVYERRSETTDKQEIAGVDLGVNNLMAVTTNQTGVAPLLVNGRPLKAINTFYNKQRSRLQSQLKTRNNQPSSKRLLFLTHKRNCRVENYLHTASKRVIDWCTIHQIGTLIIGHNERMKQSLNLGKRNNQQFVNIPHNRLIEMLTYKAQLKGIKVIITEESYTSQSSALDRDELPKYGEEKPLFKGKRLARGLYKMGTNQLLNADVNGAFNIIRKVIPDVIDQGIKGLPFNPVVLDPLVSEPVELRMTKLSGF

SEQ ID NO: 5221 - protein, 451 aa, unidentified
MAKKKAVKVLRKQKKRETLRRFTQKQNIGRACLTAQEFRLLQRMSHSSKALRNVGLYTMKQSYLNYNKMATVKEVDTAMQADMNYWGIQSNSVQAIRRALFTEVKSFFKALEQWKKNPEKFTGRPKFPNYSHSTDKRIIEIYQVPKVDENGFWMIPMSVAFRKKFGSIKIRMPKNLRNKNISYIEIVPKQKGRFFEVHYTYEMHVSQMKKQPMTTSNALGCDLGVDRLVSCVTNTGDAFLIDGKKLKSINQYFNKTIRNLQQKNVENGLSKRIVTNKIAALWHKRERQIHGYIAQTVGLLFKKVKEFDIDTIVVGYNAGWKQNSHMGKKNNQTFVQIPFHKLIAAIENKCIKEGIRFFKQEESYTSKASFLDKDPVPVWSKDDRTQYRFSGKRITRGLYQSKAGTCIHADINGALNTLQKSQVVELDGNLKVKTPILLEVQKRKAVASRIA

SEQ ID NO: 5222 - protein, 451 aa, unidentified
MAKKKAVKVLRKQKKRETLRRFTQKQNIGRACLTAQEFRLLQRMSHSSKALRNVGLYTMKQSYLNHNKMATVKEVDTAMQADMNYWGIQSNSVQAIRRALFTEVKSFFKALEQWKKNPEKFTGRPKFPNYSHSTDKRIIEIYQVPKVDENGFWMIPMSVAFRKKFGSIKIRMLKNLRNKNISYIEIVPKQKGRFFEVHYTYEMHVSQMKKQPMTTSNALGCDLGVDRLVSCVTNTGDAFLIDGKKLKSINQYFNKTIRNLQQKNVENGLSKRIVTNKIAALWHKRERQIYGYIAQTVGLLFKKVKEFDIDTIVVGYNAGWKQNSHMGKKNNQKFVQIPFHKLIAAIENKCIKEGIRFFKQEESYTSKASFLDKDPVPVWSKDDRTQYRFSGKRITRGLYQSKAGTCIHADINGALNTLQKSQVVELDGNLKVKTPILLEVQKRKAVASRIA

SEQ ID NO: 5223 - protein, 418 aa, unidentified
MQLVQRHIVSQSHSYWKYFDQQCFLSKNLFNLTNYEMRQYFFSTKSVLGFTELYHKVSQTDAYYSMPNTKVAKQVIRRIHKAWVGYKSAHKDWQKNPHKYLGEPRLPKYKPKEKGRYMLVFPLETVSKPYLRKGRVKLTPCPIQIETGLQEVIEVRVVPRSGCYVIEVVYEQQELEKTTGNIVAGLDIGLVNLATLTTNQSGVKPLLIKGGALKAINTYYNKQKSKIQSNLELRHKVKTSNRLNALTHKRNCRIDNYLHTTSRRIIDWCIANQINTLVIGKNEGWKQSINIGKRNNQQFVNVPHAKLIDQIIYKATLVGIEVITTEESYSSQASFLHFDPLPKYGEKKPKFSGKRVCRGLYKSDLGILNADINGSYNIIRKQVKSNAIFDSHDLKALPFMPSVLDPLRTHNINFLQVV

SEQ ID NO: 5224 - protein, 455 aa, unidentified
MYGTKPVKLKVSDAVKAHLTYLCQQSNNLINSSLYLIRQRHFESCETKCYFDREGFYRCGRRDRFLKITYAELCKLMKDELSYKILGGQCAQQTLKTVVESCNSYNGLLKAYWKGEVDKPKVPNYRKKGGLAPITYPAQAISFNLETGKCKLPISCELNNDIKTDLGLTEIWINGCTGITIEQIAEVRIIPKNQSLYVEYVYKVEEPPSIQLDYSLALGIDPGLTNWLTCLSNKGKSFIIDGRKIKSINQNYHRKVAKLKKGNPAKYWDKVLDSVTEKRNNQMRDVINKAAKFVINYCLKHTIGNIVFGWNTGSKNEINIGKKNNQEFVQIPTARLKNRIKELCDYYGIIFTETEEAYSSKASFLDNDLVPRHGEKPSQYKFSGKRIKRGLYRTKNGLLINSDCNGSANILKKVMTQLNLDLAKVTRGALALPKRYDLFTDMKKLYRKTDCGGAF

SEQ ID NO: 5225 - protein, 441 aa, unidentified
MYGCQQVLIHPSEEVKAILEFICSQANKLANCAIYYCRQILFKTSRYVGKYEIDEALKSNVNFKAMRSACAQQLLHDVVESFTSYRRLLALWKKGELADKPRVPNYRKKGGMAVVACPSRWIKLIENNQLKIPLGNQVKAWFGIDHFLLPMPTNLNYKDIKEFRIVPRNGCFYLECVYRQKELVEMSPNPNVLGIDHGVDNLLTCTSSTGKSFIIDGKKVKSQNQWYNKRISKIQTGKPQDYWDDELALLTEKRNRQMRDNVNKSARFIINWCLRNNISTIVFGWNKRQKDSINIGRKNNQEFVQIPMAKLKSRIAQLCEPYGIRFVETEESYTSKSSFLDNDLLPTVGEKPDGWQSSGKRVNRGLYRTSNGKLINCDAQAAANIIRKVITQLEVSLAKVTRGVLSLPQRYRLDRLSKSYRKQASWWLQPDEAFRLESSPF

SEQ ID NO: 5226 - protein, 451 aa, unidentified
MAKKKAVKVLRKQKKRETLRRFTQKQNIGRVCLTAQEFRLLQRMSHSSKALRNVGLYTMKQSYLNHNKMATVKEVDTAMQADTNYWGVQSNSVQAIRRALFTEVKSFFKALEQWKKNPEKFTGRPKFPNYSHSTDKRIIEIYQVPKVDENGFWIIPMSVAFRKKFGSIKIRMPKNLRNKKISYIEIVPKQKGRFFEVHYTYEMHVSQMKQQSTTTSNALSCDLGVDRLVSCVTNTGDAFLIDGKKLKSINQYFNKMICNLGQKNMDNGISKRIVTNKMAALWHKRERQINGYIAQTVGLLFKKVKEFDIDTIVVGYNAGWKQNSHMGKKNNQKFVQIPFHKLIAAIENKCIKEGIRFFKQEESYTSKASFLDKDPVPVWSKDDKTQYRFSGKRMTRGLYQSKAGTCIHADINGALNTLQKSQVVELDGNLKVKTLILLEVQKRKAVASRIA

SEQ ID NO: 5227 - protein, 451 aa, unidentified
MVKKKAVKVLRKQKKRETLRRFTQKQNIGRACLTAKEFRLLQRMSHSSKALRNVGLYTIKQSYLNHNRMATVKEVDTAMQADMNYWGMQSNSVQAIRRALYAEVKSFFKALKKWKENPETFTGRPKFPNYSRSTDKRIIEIYQVPKVDENGYWMIPMSVAFRKKFGSIKIRMPKNIRNKKISYIEIVPKQKGRFFEVHYTYEMHVSQMKKQSTTISNALSCDLGVDRLVSCVTNTGDTFLIDGKKLKSINQYFNKKIRNLQQKNIENGISKRVVTNKIAALWHKRERQINGYISQTVGLLFKKVKAFGIDTIVVGYNAGWKQKSDMGKKNNQKFVQIPFHKLIAAIENKCIKEGIRFFKQEESYTSKASFLDKDPVPVWSKDDRTQYRFSGKRMTRGLYQSKAGTCIHADINGALNTLEKSRVVEWDDNLKVKTPILLEVQKRKAVASRIA

SEQ ID NO: 5228 - protein, 455 aa, unidentified
MVKTMARKKAVKVLRKQKKRETMQRFTQKQNIGRACLTAKEFRLLQRMAHSSKALRNVGLYTIKQSYLNDNKMATVKEVDNAMQADMNYSGVQSNSVQAIRRALFTEMKSFFKALEQWKKHPDKFTGRPKFPNYSRSTDKRIIEIYQVPKVDENGYWIIPMNVAFRKKFGSIKIRMPKNLRNKKISYIEIVPKQKGRFFEVHYTYEMHVSQMKKQPTTTSNALSCDLGVDRLVSCVTTTGDTFLIDGKKLKSINQYFNKVIRNLQQKNMENGLSKRVVTNQMAALWHKRERQIHGYISQTVGLLFKKVKAFGIDTIVVGYNAGWKQKSDMGKKNNQKFVQIPFHKLIVAIENKCIKEGIRFVKQEESYTSKASFLDKDPVPVWSNGDKTHYLFSGKRITRGLYQSKAGTCIHADINGALNTLQKSRIVEWDDNLKVKTPILLKVQKRKAVASRIA

SEQ ID NO: 5229 - protein, 455 aa, unidentified
MVKTMVKKKAVKVLRKQKKRENMQRFTQKQNLGRACLTAKAFRLLQRMSHSSKALRNVGLYTMKQSYLNHNRMATVKEVDTAMQADMNYWGIQSNSVQAIRRALYAEVKSFFKALEQWKKKPEKFTGRPKFPNYSRSTDKRIIEIYQAPKVDENGYWMIPMSVAFRKKFGSIKIRMPKNIRNKKISYIEIVPKQKGRFFEVHYTYEMHVSQMKQQSTTTSNALSCDLGVDRLVSCVTNTGDTFLIDGKKLKSINQYFNKMIRNLQLKNVENGLSKRVVTNKMAALWHKRERQINGYISQTVGLLFKKVKACNIDTVVVGYNVGWKQKSDMGKKNNQTFVQIPFHKLLAAIENKCVKEGIRFFKQEESYTSKASFLDKDPVPVWSKDDRTHYRFSGKRITRGLYKSKSGKCIHADINGALNTLEKSKVVELDESLKVKTPILLEVQKRKAVASRIA

SEQ ID NO: 5230 - protein, 474 aa, unidentified
MFRLVPNIDLLKVMNLLRKVVKTMAKKKAVKVLRKLKKRENLQRFTQKQNIGRACFTAKEYRLLQRMSHSSKALRNVGLYTIKQSYLKHNKMATVKEVDTAMQADMNYSGIQSNSVQAIRRALFTEVKSFFKALEQWKKKPETFAGRPRFPNYSGPTDKRIIEIYQVPKVDDNGYWMIPMNVAFRKKFGSIKIRMPKNVRNKKISYIEIIPKQKGRFFEVHYTYEMHVSQMKKQSTTTSNALSCDLGVDRLLSCVTNTGDTFLIDGKKLKSINQYFNKMIRNLQQKNMDNGISKRIVTNKMAALWHKRERQINGYISQTVGLLFKKVKACNIDTVVVGYNAGWKQKSDMGKKNNQKFVQIPFHKLIAAIENKCVKEGIRFLKQEESYTSKASFLDKDRVPVWSKDDRTHYRFSGKRITRGLYQSKTGTCIHADINGALNTLKKSRVVQLDENLKVKTPILLEVQKRKAVASCIA

SEQ ID NO: 5231 - protein, 455 aa, unidentified
MVKTMTKKRAVKVLRKQKKRENMQRFTQKQNIGRACLTAKEFRLLQRMSHSSKALRNVGLYTIKQSYLNNNKMATVKEVDTAMQTDMNYWGIQSNSVQAIRRALFTEVKSFFKAMEQWKKKPETFTGRPKFPNYSRSTDKRIIEIYQVPKIDNNGYWMIPMNVAFRKKFGSIKIRMPKNLRNKKISYIEIVPKQKGRFFEVHYTYEMHVSQMKKQPTTISKALSCDLGVDRLLSCVTNTGDAFLIDGKKLKSINQYFNKMIRNLQLKNMENGLSKRVVTNKMAELWHKRERQINGYISQTVGLLFEKVKAFNIDTVVVGYNAGWKQKSDMGKKNNQKFVQIPFHKLIAAIENKCIKEGIRFLKQEESYTSKASFLDKDRVPVWDKDDRTHYRFSGKRITRGLYQSKAGKCIHADINGALNTLEKSRVVELDDNLKVKTPILLEVQKRKAVASCIA

SEQ ID NO: 5232 - protein, 454 aa, unidentified
MKTMARKKAVKVLRKQKKREIIQRFTQKQNIGRACLTAKEFRLLQRMSHSSKALRNVGLYTIKQSYLNHNKMATIREVDTAMQADMNYWGIQSNSVQAIRRALFTEVKSFFKALEQWKKKTEQFTGRPKFPNYSRSTDKRIIEIYQVPKVDENGYWMIPMNVAFRKKFGSIKIRMPKNLRNKNISYIEIVPKQKGRFFEVHYTYEMHVSQMKKPPTTTSNALSCDLGVDRLLSCVTNTGDAFLMDGKKLKSINQYFNKMICNLGQKNMDNGISKRIVTNKMAALWHKRERQINGYIAQTVGLLFKKVKEFDIDTIVVGYNAGWKQNSHMWKKNNQKFVQIPFQKLIAAIENKCVKEGIRFFKQEESYTSKASFLDKDPVPVWSKDDKTQYRFSGKRITRGLYQSKAGTCIHADINGALNTLKKSGVVELDGNLKVKTPILLEVQKRKAIALCIA

SEQ ID NO: 5233 - protein, 455 aa, unidentified
MVKTMAKKKAVKVLRKQKKRETLRRFTQKQNIGRACLTAQEFRLLQRMSHSSKALRNVGLYTMKQSYLNYNKMATVKEVDTAMQADMNYWGIQSNSVQAIRRALFTEVKSFFKALEQWKKNPEKFTGRPKFPNYSHSTDKRIIEIYQVPKVDENGFWMIPMSVAFRKKFGSIKIRMPKNLRNKNISYIEIVPKQKGRFFEVHYTYEMHVSQMKKQPMTTSNALGCDLGVDRLVSCVTNTGDAFLIDGKKLKSINQYFNKTIRNLQQKNVENGLSKRIVTNKIAALWHKRERQIHGYIAQTVGLLFKKVKEFDIDTIVVGYNAGWKQNSHMGKKNNQKFVQIPFHKLIAAIENKCIKEGIRFFKQEESYTSKASFLDKDPVPVWSKDDRTQYRFSGKRITRGLYQSKAGTCIHADINGALNTLQKSQVVELDGNLKVKTPILLEVQKRKAVASRIA

SEQ ID NO: 5234 - protein, 455 aa, unidentified
MVKTMVKKKAVKVLRKQKKRENIQRFTQKQNIGRACLTAKEFRLLQRMSHSSKALRNVGLYTIKQSYLNHNKMATVKEVDNAMQADMNYWGIQSNSVQAIRRALFTEVKSFFKAWEQWKKNPETFTGRPKFPNYSRSTDKRIIEIYQVPKVDDNGYWMIPMNVAFRKKFGSIKIRMPKNLRNKKISYIEIVPKQKGRFFEVHYTYEMHVSQMKQQSTTTSNALSCDLGVDRLLSCVTNTGDTFLIDGKKLKSINQYFNKKIRNLQQKNIENGISKRVVTNRMAALWHKRERQVNGYISQTVGLLFKKVKAFDIDTIVVGYNTGWKQKSDMGKKNNQKFVQIPFHKLIAAIENKCIKEGIRFLKQEESYTSKASFLDKDPIPVWSKDDRAHYRFSGRRITRGLYQSKAGTCIHADINGALNTLEKSRVVELDDNLKVKTPILLEVQKRKAVASRIA

SEQ ID NO: 5235 - protein, 454 aa, unidentified
MKTMARKKAVKVLRKQKKREIIQRFTQKQNIGRTCLTAKEFRLLQRMSHSSKALQNVGLYTIKQSYLNHNKMATIREVDTAMQADMNYWGIQSNSVQAIRRALFTEVKSFFKALEQWKKKTEQFTGRPKFPNYSRSTDKRIIEIYQVPKVDENGYWMIPMNVAFRKKFGSIKIRMPKNLRNKNISYIEIVPKQKGRFFEVHYTYEMHVSQMKKPPTTTSNALSCDLGVDRLLSCVTNTGDAFLMDGKKLKSINQYFNKMICNLGQKNMDNGISKRIVTNKMAALWHKRERQINGYIAQTVGLLFKKVKEFDIDTIVVGYNAGWKQNSHMGKKNNQKFVQIPFQKLIAAIENKCVKEGIRFFKQEESYTSKASFLDKDPVPVWSKDDKTQYRFSGKRITRGLYQSKAGTCIHADINGALNTLKKSGVVELDGNLKVKTPILLEVQKRKAIALCIA

SEQ ID NO: 5236 - protein, 455 aa, unidentified
MVKTMAKKKAVKVLRKQKKRETLRRFTQKQNIGRACLTAQEFRLLQRMSHSSKALRNVGLYTMKQSYLNYNKMATVREVDTAMQADMNYWGIQSNSVQAIRRALFTEVKSFFKALEQWKKNPEKFTGRPKFPNYSHSTDKRIIEIYQVPKVDENGFWMIPMSVAFRKKFGSIKIRMPKNLRNKNISYIEIVPKQKGRFFEVHYTYEMHVSQMKKQPMTTSNALGCDLGVDRLVSCVTNTGDAFLIDGKKLKSINQYFNKTIRNLQQKNVENGLSKRIVTNKIAALWHKRERQIHGYIAQTVGLLFKKVKEFDIDTIVVGYNAGWKQNSHMGKKNNQKFVQIPFHKLIAAIENKCIKEGIRFFKQEESYTSKASFLDKDPVPVWSKDDRTQYRFSGKRITRGLYQSKAGTCIHADINGALNTLQKSQVVELDGNLKVKTPILLEVQKRKAVASRIA

SEQ ID NO: 5237 - protein, 455 aa, unidentified
MVKTMVKKKAVKVLRKQKKRETLRRFTQKQNIGRACLTAKEFRLLQRMSHSSKALRNVGLYTIKQSYLNHNRMATVKEVDTAMQADMNYWGMQSNSVQAIRRALYAEVKSFFKALKKWKENPETFTGRPKFPNYSRSTDKRIIEIYQVPKVDENGYWMIPMSVAFRKKFGSIKIRMPKNIRNKKISYIEIVPKQKGRFFEVHYTYEMHVSQMKKQSTTISNALSCDLGVDRLVSCVTNTGDTFLIDGKKLKSINQYFNKKIRNLQQKNIENGISKRVVTNKIAALWHKREKQINGYISQTVGLLFKKVKAFGIDTIVVGYNAGWKQKSDMGKKNNQKFVQIPFHKLIAAIENKCIKEGIRFFKQEESYTSKASFLDKDPVPVWSKDDRTQYRFSGKRMTRGLYQSKAGTCIHADINGALNTLEKSRVVEWDDNLKVKTPILLEVQKRKAVASRIA

SEQ ID NO: 5238 - protein, 455 aa, unidentified
MVKTMAKKKAVKVLRKQKKRETLRRFTQKQNIGRACLTAQEFRLLQRMSHSSKALRNVGLYTMKQSYLNHNKMATVKEVDTAMQADMNYWGIQSNSVQAIRRALFTEVKSFFKALEQWKKNPEKFTGRPKFPNYSHSTDKRIIEIYQVPKVDENGFWMIPMSVAFRKKFGSIKIRMPKNLRNKNISYIEIVPKQKGRFFEVHYTYEMHVSQMKKQPMTTSNALGCDLGVDRLVSCVTNTGDAFLIDGKKLKSINQYFNKMICNLGQKNMDNGISKRIVTNKIAALWHKRERQIHGYIAQTVGLLFKKVKEFDIDTIVVGYNAGWKQNSHMGKKNNQKFVQIPFHKLIAAIENKCIKEGIRFFKQEESYTSKASFLDKDPVPVWSKDDRTQYRFSGKRITRGLYQSKAGTCIHADINGALNTLQKSQVVELDGNLKVKTPILLEVQKRKAVASRIA

SEQ ID NO: 5239 - protein, 455 aa, unidentified
MVKTMAKKKAVKVLRKQKKRETLRRFTQKQNIGRACLTAQEFRLLQRMSHSSKALRNVGLYTMKQSYLNYNKMATVKEVDTAMQADMNYWGIQSNSVQAIRRALFTEVKSFFKALEQWKKNPEKFTGRPKFPNYSHSTDKRIIEIYQVPKVDENGFWMIPMSVAFRKKFGSIQIRMPKNLRNKNISYIEIVPKQKGRFFEVHYTYEMHVSQMKKQPMTTSNALGCDLGVDRLVSCVTNTGDAFLIDGKKLKSINQYFNKTIRNLQQKNVENGLSKRIVTNKIAALWHKRERQIHGYIAQTVGLLFKKVKEFDIDTIVVGYNAGWKQNSHMGKKNNQKFVQIPFHKLIAAIENKCIKEGIRFFKQEESYTSKASFLDKDPVPVWSKDDRTQYRFSGKRITRGLYQSKAGTCIHADINGALNTLQKSQVVELDGNLKVKTPILLEVQKRKAVASRIA

SEQ ID NO: 5240 - protein, 455 aa, unidentified
MVKTMARKRAVKVLRKQKKRETMQRFTQKQNIGRACLTAKEFRLLQRMAHSSKALRNVGLYTIKQSYLNDNKMATVKEVDTAMQADMNYSGVQSNSVQAIRRALFTEMKSFFKALEQWKKHPEKFTGRPKFPNYSRSTDKRIIEIYQVPKVDEKGYWIIPMNVAFRKKFGSIQIRMPKNLRNKKISYIEIVPKQKGRFFEVHYTYEMHISQMKKQPTTTSNALSCDVGVDRLVSCVTNTGDAFLIDGKKLKSINQYFNKMIGNLQQKNVENGLSKRIVTNKIAALWHKRERQIHGYIAQTVGLLFKKVKEFDIDTIVVGYNAGWKQKSDMGKKNNQTFVQIPFHKLIAAIENKCVKEGIRFLKQEESYTSKASFLDKDPVPVWSRDDKTYYLFSGKRITRGLYQSKAGTCIHADINGALNTLQKSRVVELDENLKVKTPILLEVQKRKAVATRIA

SEQ ID NO: 5241 - protein, 414 aa, unidentified
MKLSFKYYPKLNQQQLNIIEELSYHTTKLYNIANYNCREDTVKSYVEMNKIYNNNYHKQFLHSHNYQQCLKILEKNWKSYFASIKDYKKNPNKYLGQPRQPKFKNTNNKKNEIIFTQHAIRLQDNILKLSLSKEIKNKFQVQSLNFDLSKIKIPVDLITIKQIKIQWNNSKKQWNLNIIWAKEEVNIAKDYYNIMSIDLGLNNLATITFEDNIHSYIIDGKYVKSKNSYYYKEIARLTSIVMKQYKNSKYFKRTQQLIKLQTKRNNFIKDYIHKSSKRIIDLAIINRCHTIVIGDFKGIKQENTAKSFVQIPQQQLVEKIKYKAKLLGIKVVIQNESYTSGCSVLDLEEIGKDKYNKNRRIYRGLFKSNKGILINADVNGSYNIMRKYLKCTPKSLIKIMDNGFLDNPIRLRVA

SEQ ID NO: 5242 - protein, 409 aa, unidentified
MTLTERHIIKPTHPIFKRIKDFCHLSKNLYNYANFILREHYFAGFKLPTAYDLINRFVKESQRDYKALPAQSAQQVLMLLSQNWKSYLKALKAYKLKPSSFLARPKIPKFKPKDGVSIGVLTNQQTSFTKGRMTKIKFPKKANLKRLITKINPQTSRLKQVRLIPKTTCFIVEVVYEQTTHKLPQTHGIGIMGIDLGLNNFVTAIDNQSSPFIIKGGGVKSVNQWFNKLKAHYQAKAKTSNKRFWTKRLGKLALWRECKVNDFMHKASAYVVRHCLKKGISTIVIGKNDGWKQELKLGKRTNQNFTNIPYESFIEKLAYKSALVGITLRTTEERFTSKCDHLANEPMQHHEQYLGKRVKRGLFKSSIGKSLNADINGAIGILRKVFPDAVKTLRDSGVVFAPVKISLAF

SEQ ID NO: 5243 - protein, 409 aa, unidentified
MTLTERHIIKPTHPIFKRIKDFCHLSKNLYNYANFILREHYFAGFKLPTAYDLINRFVKESQRDYKALPAQSAQQVLMLLSQNWKSYLKALKAYKLKPSSFLARPKIPKFKPKDGVSIGVLTNQQTSFTKGRMTKIKFPKKANLKRLITKINPQTSRLKQVRLIPKTTCFIVEVVYEQTTHKLPQTHGIGIMGIDLGLNNFVTAIDNQSSPFIIKGGGVKSVNQWFNKLKAHYQAKAKTSNKRFWTKRLGKLALWRECKVNDFMHKASAYVVRHCLKKGISTIVIGKNDGWKQELKLGKRTNQNFTNIPYESFIEKLAYKSALVGITLRTTEERFTSKCDHLANEPMQHHEQYLGKRVKRGLFKSSIGKSLNADINGAIGILRKVFPDAVKTLRDSGVVFTPVKISLAF

SEQ ID NO: 5244 - protein, 416 aa, unidentified
MYLTQKNHVKADKQKYEVLKRITKLSKNLYNFTLYTTRQYYFENGKYINHESAYHLVKDNENYKMLPSQVAQQTMKVVDRNMKSFFRVLGERKRGNYNRPVKMPEYLPKDSKFVCIFPKDMFKIDGNDIRLSMGKNFYKNYGVRYLYFKLPENIIGKHIKEIRIIPKYNGQWFEIEYVYRDNGNGEKVDLDYNKHLSIDLGVNNFATSVDTNGTAFIIEGRGLKSYNRWWNKVKSGLQSVYDKQGIKSGQKLNWLFEKRKNKLNDFMNQSVNYIIKHCIDNNIGNIIIGELKDIKQNSNMGKKNNQTFQTIPFGKFKQKLRSKCEYYGIKHIEVDEAYTSKTDALALEPIEKHQKYMGKRVKRGLFQSSTGKLLNADVNGALNILRKVVGDSLIEITDSGCVNHPRRIRFFGVNSF

SEQ ID NO: 5245 - protein, 414 aa, unidentified
MYLTQKNHVKADKQKYEVLKRITKLSKNLYNFTLYTTRQYYFENGKYINHESAYHLVKDNENYKMLPSQVAQQTMKVVDRNMKSFFRVLGERKRGNYNRPVKMPEYLPKDSKFVCIFPKDMFKINDGFIRLSMGRDFYKNYGVRYLYFKLPENIIGKHIKEVRIIPKYNGQWFEIEYVYRDIGEKVDLDYNKHLSIDLGVNNFATCVDTNGTAFIIEGRGLKSYNRWWNKVKSGLQSVYDKQGIKSGQKLNWLFEKRKNKLNDFMNQSVNYIVKHCIDNNIGNIIIGELKDIKQNFNMGKKNNQTFQTIPFGKFKQKLRSKCEYYGINCIEVDEAYTSKTDALALEPIEKHQKYMGKRVKRGLFQSSTGKLLNADVNGALNILRKVVGDSLTGITDSGCVNHPRRIRLFGVNSF

SEQ ID NO: 5246 - protein, 430 aa, unidentified
MKITTKNYLRMNKQQYWIVDTLSKLSKNLYNVGVYNVRQYYFYNNKFLPYTNNYHYCKDNDNYSLLYSDNAQQILKIVDRTFKSYFRLLKERKKGNYNRPINTPGYLDKNGRFVLIYPAQRMSIKGRYFKLGMSREFKKQYGLNGDELTFKLPDHINPDELKEVRIVPKHDGKFYQMQYVYDKKLQDMNLDKNQYLSIDLGLDNFATFVETSTGTAEIIDGKHIKSINQFYNKEKARLQGVKDKQGMEHKFTKRLSRLTNKRDNKVDEFLNRSVDYIVKTCIDKDIGNIVIGELKEIKQEQNIGKKNNQNFQSIPYFLFKSKLQSKCDLYGINYIEEDESYTSKTDALSLEPIRKHEEYMGRRIKRGLFKSSTGQLLNADVNGALNILRKVVGDSIQRITDRGLVSRPERIRVTFEPEKRPAFSRIKLSV

SEQ ID NO: 5247 - protein, 416 aa, unidentified
MHLTQKNHIKADKQKYEVLKRITKLSKNLYNFTLYTTRQYYFDNSKYLNHESAYHLVKENENYKMLPSQVAQQTMKVVDRNMKSFFRILGEKKRGNYNRPVKMPEYLPKDSKFVCIFPKDMFKIEDNKIRLSMGREFYKNYGVRYLYFKLPENITGKHIKEVRIIPKYNGQWFEIEYVYRDNGNGEKVDLDYNKHLSIDLGVNNFATCVDTNGTAFIIEGRGLKSYNRWWNKVKSGLQSVYDKQGIKSGQKLNWLFEKRKNKLNDFMNQSVNYIVKHCIDNNIGNIIIGELKDIKQNSNMGKKNNQTFQTIPFGKFKQKLRSKCEYYGIKYIEVDEAYTSKTDALALEPIGKHRKYMGKRVKRGLFQFSTGKLLNADVNGALNILRKVVGDSLIEITDSGCVNHPRRIRFFGNTCR

SEQ ID NO: 5248 - protein, 414 aa, unidentified
MYLTQKNHVKADKQKYEVLKRITKLSKNLYNFTLYTTRQYYFDNSKYLNHESAYHLVKDNENYKMLPSQVAQQTMKVVDRNMKSFFRVLGERKRGNYNRPVKIPEYLPKDSKFVCIFPKDMFKINDGFIRLSMGREFYKNYGVRYLYFKLPENITGKHIKEVRIIPKYNGQWFEIEYVYRDNGEKVDLDYNKHLSIDLGVNNFATSVDTNGTAFIIEGRGLKSYNRWWNKVKSGLQSIYDKQGIKSGQKLNWLFEKRKNKINDFMNQSVNYIIKHCIDNNIGNIIIGELKNIKQNSNMGKKNNQTFQTIPFGKFKQKLRSKCEYYGIKCIEVDEAYTSKTDALALEPIEKHQKYMGKRVKRGLFQSSTGKLLNADVNGALNILRKVVGDSLTGITDSGCVNHPGRIRFFGNTCR

SEQ ID NO: 5249 - protein, 430 aa, unidentified
MKFTTKNYLRMNKQQYWIVDTLSKLSKNLYNVGVYNVRQYYFYNNKFLPYTNNYHYCKNNDNYSLLYSDNAQQVLKIVDRTFKSYFRLLKERKKGNYNRPINTPGYLDKNGRFVLIYPAQRMSIKGRYFKLGMSREFKKQYNLNGDELTFKLPDHINPDELKEVRIVPKHDGKFYQIQYVYDKKPQDMNLDKNQYLSIDLGLDNFATFVETSTGTAEIIDGKHIKSINQFYNKEKAKLQGVKDKQSMEHKFTKRLSRLTNKRDNKVDEFLNRSVDYIVKTCIDKDIGNIVIGELKEIKQEQNIGKKNNQNFQSIPYFLFKSKLQSKCDLYGINYIEEDESYTSKTDALALEPIRKHEEYMGRRIKRGLFKSSTGQLINADVNGALNILRKVVGDSIQRITDRGLVSRPERIRVTFEPEKRPAFSRIKLSV

SEQ ID NO: 5250 - protein, 414 aa, unidentified
MHLTQKNHIKADKQKYEVLKRITKLSKNLYNFTLYTTRQYYFDNSKYLNHESAYHLVKDNENYKMLPSQVAQQTMKVVDRNMKSFFRVLGERKRGNYNRPVKMPEYLPKDSKFVCIFPKDMFKIDERFIRLSMGREFYKNYGVRYLYFKLPENITGKHIKEVRIIPKYNGQWFEIEYVYRDIGEKVDLDYNKHLSIDLGVNNFATCVDTNGTAFIIEGRGLKSYNRWWNKVKSGLQSVYDKQGIKSGQKLNWLFEKRKNKLNDFMNQSVNYIVKHCIDNNIGNIIIGELKDIKQNSNMGKKNNQTFQTIPFGKFKQKLRSKCEYYGINCIEVDEAYTSKTDALALEPIEKHQKYMGKRVKRGLFQSSTGKLLNADVNGALNILRKVVGDSLIEITDSGCVNHPRRIRFFGVNSF

SEQ ID NO: 5251 - protein, 414 aa, unidentified
MHLTQKNHIKADKQKYEVLKRITKLSKNLYNFTLYTTRQYYFDNSKYLNHESAYHLIKENENYKMLPSQVAQQTMKVVDRNMKSFFRVLGEKKRGNYNRPVKMPEYLPKDSKFVCIFPKDMFKIDERFIRLSMGREFYKNYGVRYLYFKLPENITGKHIKEVRIIPKYNGQWFEIEYVYRDIGEKVDLDYNKHLSIDLGVNNFATCVDTNGTAFIIEGRGLKSYNRWWNKVKSGLQSVYDKQGIKSGQKLNWLFEKRKNKLNDFMNQSVNYIVKHCIDNNIGNIIIGELKDIKQNSNMGKKNNQTFQTIPFGKFKQKLRSKCEYYGINCIEVDEAYTSKTDALALEPIEKHQKYMGKRVKRGLFQSSTGKLLNADVNGALNILRKVVGDSLIEITDSGCVNHPRRIRFFGNTCR

SEQ ID NO: 5252 - protein, 451 aa, unidentified
MARKKAVKVLRKQKKRENMQRFTQKQNIGRACLTAKEFRLLQRMSHSSKALRNVGLYTIKQSYLNDNKMATIKEVDTAMQADTNYWGMQSNSVQAIRRTLFTEVKSFFKALEQWKKNPEKFTGRPKFPNYSRSTDKRIVEIYQVPKVDDNGYWMIPMNVAFRKKFGSIKIRMPKNLKNKKISYIEIVPKQKGRFFEVHYTYEMHVSQMKKPSTTTSNALSCDLGVDRLVSCVTNTGDAFLIDGKKLKSINQYFNKMICNLGQKNMDNGISKRIVTNKMAALWHKRERQINGYIAQTVGLLFKKVKEFDIDTIVIGYNAGWKQNSHMGKKNNQKFVQIPFQKLMAAIENKCIQEGIRFFKQEESYTSKASFIDKDPVPVWSKDDKTQYRFSGKRITRGLYQSKAGTCIHADINGALNTLQKSRVVQLDDNLKVKTPILLEVQKRKAVASRIA

SEQ ID NO: 5253 - protein, 451 aa, unidentified
MARKKAVKVLRKQKKRETMQRFTQKQNIGRACLTAKEFRLLQRMSHSSKALRNVGLYTMKQSYLNHNRMATVKEVDTAMQANMNYPGVQSNSVQAIRKSLFTEVKSFFKALEQWKKNPEKFTGRPKFPNYSRSTDKRIIEIYQVPKVDENGYWIIPMNVAFRKKFGSIKIRMPKNLRNKNISYIEIVPKQKGRFFEVHYTYEMHVSQMKKPSTTTSNALSCDLGVDRLVSCVTHTGDAFLIDGKKLKSINQYFNKMICNLQQKNMDNGISKRIVTNKMAALWHKRERQINGYIAQTVGLLFKKVKEFDIDTIVIGYNAGWKQKSHMGKKNNQKFVQIPFQKLIAAIENKCVKEGIRFFKQEESYTSKASFLDKDPVPVWSKDDRTQYRFSGKRITRGMYQSKAGTCIHADINGALNTLKKSGVIEWDDNLKVKTPILLEVQKRKAVTSRIA

SEQ ID NO: 5254 - protein, 451 aa, unidentified
MAKKKAVKVLRKQKKRETLRRFTQKQNIGRAYLTAQEFRLLQRMSHSSKALRNVGLYTMKQSYLNHNKMATVKEVDTAMQADMNYWGIQSNSVQAIRRALFTEVKSFFKALEQWKKNPEKFTGRPKFPNYSHSTDKRIIEIYQVPKVDENGFWMIPMSVAFRKKLGSIKIRMPKNLRNKKISYIEIVPKQKGRFFEVHYTYEMHVSQMKQQSTTTSNALSCDLGVDRLVSCVTNTGDAFLIDGKKLKSINQYFNKMICNLGQKNMDNGISKRIVTNKMAALWHKRERQINGYIAQTVGLLFKKVKESDIDTIVVGDNAGWKQNSHMGKKNNQKFVQIPFHKLIAAIENKCIKEGIRFFKQEESYTSKASFLDKDPVPVWSKDNRAQYYFSGKRITRGLYQSKAGTCIHADINGALNTLQKSQVVELDGNLKVKTPILLEVQKRKAVASRIA

SEQ ID NO: 5255 - protein, 442 aa, unidentified
MAKARSKTPKKPKVPLGVQQNLISPSQQLKAVLEFICSESNKLHNCATYYARQIWFKSHKYVTSFDLVKNLTKNAHFSALPSDAATQTCLSVGESISAFAKLRELWRNGELENKPKPPNYRKPGYQLVAYPKRALKLIDGQIRFPLGLRVNAWFGLKEFFLPMPSNLDFENLREVRILPRNGCFYAEFVYPVVVKKPILDPAKCLGLDHGLNNWLTGVSNVGTSFIVDGKHLKSINQWYNKQVAKQMTDKPNGFWSKRLAAMTEKRNRQMRDAVNKAARIVIQHCLDNSIGTLVFGWNKGQKSGIDLGNKTNQNFVQIPTARLKARIEQLCKLYGIRFEETEESYTSKASFLDADALPNFGEKPVGEATLKELGWKASGKRVKRGLYRTSEGVEINADCNGAANILRKVAVKLGLDLSGISRGGLCSPLKSRFWTIQESQRL

SEQ ID NO: 5256 - protein, 451 aa, unidentified
MAKKKAVKVLRKQKKRETLRRFTQKQNIGRAYLTAQEFRLLQRMSHSSKALRNVGLYTMKQSYLNHNKMATVKEVDTAMQADMNYWGIQSNSVQAIRRALFTEVKSFFKALEQWKKNPEKFTGRPKFPNYSHSTDKRIIEIYQVPKVDENGFWMIPMSVAFRKKLGSIKIRMPKNLRNKKISYIEIVPKQKGRFFEVHYTYEMHVSQMKQQSTTTSNALSCDLGVDRLVSYVTNTGDAFLIDGKKLKSINQYFNKMICNLGQKNIDNGISKRIVTNKMAALWHKRERQINGYIAQTVGLLFKKVKESDIDTIVVGYNAGWKQNSHMGKKNNQKFVQIPFHKLIAAIENKCIKEGIRFFKQEESYTSKASFLDKDPVPVWSKDNRAQYYFSGKRITRGLYQSKAGTCIHADINGALNTLQKSQVVELDGNLKVKTPILLEVQKRKAVASRIA

SEQ ID NO: 5257 - protein, 405 aa, unidentified
MYKTQKNHIRCNKQTYRLLRILCRVSKNLYNYALYHIRQHYFNTQQYLRYESVYHIVKENKNYRLLPSQVAQQTLLCVDEAFKSFFKLLVAKKEGKTDKKVSIPKYLPKDGMFLLSFPKDQFKVEKDKVRLSLGRNFYREFGVRHLYFDLPANILGKRIKEVRILPKFHGRWFEIEYVYEEVTQSYKLDRNKYLSIDLGLDNFAAVVDTIGTAFIIEGGYIKSVNRWYNKERARLQSIYSKQGIKYGSKLAKISLKRQHVVDNFLDQAVSLIIKHCLNNQIGTIVIGKMKYIKQEINLGKVNNQNFVGIPYEKFKKKLEAKCEYYGIGYKEVDESYTSQTCGRCGVVRKSNRKYRGLYVCKNCGYVVNADINGAMNILGKVAGESAAKQIASSGRVNRPVRIRVV

SEQ ID NO: 5258 - protein, 451 aa, unidentified
MARKKAVKVLRKQKKRETMQRFTQKQNIGRACLTAKEFRLLQRMSHSSKALRNVGLYTIKQSYLNHNKVATVKEVDTAMQADMNYWGVQSNSVQAIRRALFTEVKSFFKALEQWKKNPETFTGRPKFPNYSRSTDKRIIEIYQVPKVDDNGYWMIPMSIAFRKKFGSIKIRMPKNLRNKKISYIEIVPKQKGRFFEVHYTYEMHVSQMKKPPTTTSNALSCDLGVDRLVSCVTNTGDAFLIDGKKLKSINQYFNKMIGNLGRKNMDNGISKRIVTNKMAALWHKRERQINGYIAQTVGLLFKKVKEFDIDTIVVGYNAGWKQNSHMGKKNNQKFVQIPFHKLIAAIENKCKKEGIRFFKQEESYTSKASFLDKDKVPVWSKDDKTHYRFSGKRITRGLYQSKAGTCIHADINGALNTLEKSKVVELDENFKVKTPILLEVQKRKAVASRIA

SEQ ID NO: 5259 - protein, 405 aa, unidentified
MYKTQKNHIRCDKQTYKLLRILCHLSKNLYNYTLYYLRQHYFKTQQYLQYESVYHIVKENENYRLLPSQVAQQTLISVDEAFKSFFKLLTAKKEGKVDKKISIPKYLPKDGMFLLSFPEDQFKVEANKLRISLGRGFYKEFGVKYLYFELPKNIIGKKLKKVRIIPKYHGRWFKIEYVYEEEEKSYDLDRNRYLAMDLGLNNFAAVIDTIGTAFLIEGRYIKSVNRWFNKERARLQSIYSKQGIKYGKKLVQISFKRQNVIDNFLNQTANLIIKHCLKNQIGTVVVGEMKEIKQEIELGRVNNQNFVGIPYKKFKRKLKSKCEEYGIEYIEIDESYTSQKCSRCGVVRRSNRKYRGLYVCKECGYVLNADINGAINILEKVAGESAMKQITSSGCVNHPVRIRAV

SEQ ID NO: 5260 - protein, 408 aa, unidentified
MRLVERHIIKKNHRFYAEIDRLCFLSKNLYNYANYLCRQSFIFENTYRNYYDIQKTLQSQLDYQAMPAKVSQQVLMILDRNWISFKESNLAYKETPSKFKARPRLPGYKHKIKGRNVVVYKAQAISKKQLKQGIINPSKTAIYLKTKVETSKIKQVLLVPRLNHYVIEVIYEAEKQQYELEENSYASIDIGLNNLATLTFNQAGIKPLLINGKPLKSINQYYNKVKSELQSILGENKSSQKLKKLCNKREFNINDYLHKASRLIINTLINQKIGTLIIGHNTDWKQKINLGKRNNQNFVSIPYNKFIEMLSYKAEMVGIKIIITEESYTSKASFLDNDPLPVYQKGQKNQVTFSGKRINRGLYRTGKRKLINADVNGSLNIMRKAVPNAFGHGIEGVVVHPVRVTPAK

SEQ ID NO: 5261 - protein, 433 aa, unidentified
MLRVQKNRVRGLTKKEFSILRSLCHYSKNLYNVTLYTVRQYYFLNGTFLKYESAYHYVKDNENYNMLLTASGQQTMKVVDRTMKSFFGILRQRKEGNYNRPASLPHYLDKDGLFVVLFPETGFRIRNGKVYIGLSKKFREENHVDQRDIVLDVPKNIRGKHVKEVRLIPKYGGLYYDLEYVYNDRQENIALDKSKYLSIDLGLDNFATLVDSTGSAVIIDGKGLKSINQWYNKENARLQSIKDKQKIKGITKRQSRLLYRRNNKIKEGLNQAVNIVVKRCLDNGIGNVVVGELRDIKQKINHGHVNNQKFVQIPYGTFKLKLKSKCEQYGIEYHEVDEAYTSRTDALAFDEIKLQPYGESRRIERGLYRSITGNVINADVNGALNILRKVSGDSPVRGIVGRGLVNRPRRVRLYSRPPPNQIANATAAASPVL

SEQ ID NO: 5262 - protein, 417 aa, unidentified
MDKKTYKILRTLTHLSRSLYNLTLYTVKQHYELNGTFLPYVKAYHLVKDSEPYKLLPSQAAQQTMKIVERNFRSFFHVLNERRKGNYNRPVRPPKYLPKDGHFLLIFPYQSFRVKGDRIILSLGRNFARKYGVQHLEFTLPKNVKGHRIKEVRIVPRYNALWFEIEYVYEVEPERRDLDHSKYLAIDLGLNNFATCVSTTGTAFIIEGRGLKSFNRWWNREKARLQSQYDKQGVKFGKKMAWLLRKRNNVINDFMNKAVSYIVNYCLENGIGNIVIGELKGIKQNANLGKRNNQNFQYVPFGLFKQKLKAKCERYGINYSEVDEAYTSRVDALALEPIGKKKEYLGRRVKRGLFQSSTGTLVNADVNGALNILRKVAGDSPLRGIAGSGRVNRPVRVRLPWGGLTPHEAPPVRGVVH

SEQ ID NO: 5263 - protein, 409 aa, unidentified
MTLTERHIIRPTHPIFKRIKDFCHLSKNLYNYANFILREHYFAGFKLPTAYDLINRFVKESQRDYKALPAQSAQQVLMLLSQNWKSYLKALKAYKLKPSSFLARPKIPKFKPKDGVSIGVLTNQQTSFTKGRMTKIKFPKKANLKRLITKINPQTSRLKQVRLIPKTTCFIVEVVYEQTTHKLPQTHGIGIMGIDLGLNNFVTAIDNQSSPFIIKGGGVKSVNQWFNKLKAHYQAKAKTSNKRFWTKRLGKLALWRECKVNDFMHKASAYVVGHCLKKGISTIVIGKNDGWKQELKLGKRTNQNFTNIPYESFIEKLAYKSALVGITLHTTEERFTSKCDHLANEPMQHHEQYLGKRVKRGLFKSSIGKSLNADINGAIGILRKVFPDAVKTLRDSGVVFTPVKISLAF

SEQ ID NO: 5264 - protein, 409 aa, unidentified
MTLTERHIIKPTHPIFKRIKDFCHLSKNLYNYANFILREHYFAGFKLPTAYDLINRFVKESQRDYKALPAQSAQQVLMLLSQNWKSYLKALKAYKLKPSSFLARPKIPKFKPKDGVSIGVLTNQQTSFTKGRMTKIKFPKKANLKRLITKINPQTSRLKQVRLIPKTTCFIVEVVYEQTTHKLPQTHGIGIMGIDLGLNNFVTAIDNQSSPFIIKGGGVKSVNQWFNKLKAHYQAKAKTSNKRFWTKRLGKLALWRECKVNDFMHKASAYVVGHCLKKGISTIVIGKNDGWKQELKLGKRTNQNFTNIPYESFIEKLAYKCALVGITLRTTEERFTSKCDHLANEPMQHHEQYLGKRVKRELFKSSIGKSLNADINGAIGILRKVFPDAVKTLRDSGVVFTPVKISLAF

SEQ ID NO: 5265 - protein, 409 aa, unidentified
MTLTERHIIKPTHPIFKRIKDFCHLSKNLYNYANFILREHYFAGFKLPTAYDLINRFVKESQRDYKALPAQSAQQVLMLLSQNWKSYLKALKAYKLKPSSFLARPKIPKFKPKDGVSIGVLTNQQTSFTKGRMTKIKFPKKANLKRLITKINPQTSRLKQVRLIPKTTCFIVEVVYEQTTHKLPQTHGIGIMGIDLGLNNFVTAIDNQSSPFIIKGGGVKSVNQWFNKLKAHYQAKAKTSNKRFWTKRLGKLALWRECKVNDFMHKASAYVVGHCLKKGISTIVIGKNDGWKQELKLGKRTNQNFTSIPYESFIEKLAYKCALVGITLHTTEERFTSKCDHLANEPMQHHEQYLGKRVKRGLFKSSIGKSLNADINGAIGILRKVFPDAVKTLRDSGVVFTPVKISLAF

SEQ ID NO: 5266 - protein, 451 aa, unidentified
MARKKAVKVLRKQKKRETMQRFTQKQNIGRACLTAKEFRLLQRMSHSSKALRNVGLYTMKQSYLNNNRMATVKEVDTAMQADTNYSGVQSNSVQAIRRAVFTEVKSFFKALEQWKKHPEKFTGRPKFPNYSRSTDKRIIEIYQVPKVDENGYWIIPMNVAFRKKFGSIKIRMPKNLRNKKISYIEIIPKQKGRFFEVHYTYEMHVSQMKKPPTTTSNALSCDLGVDRLVSCVTNTGDAFLIDGKKLKSINQYFNKMIRNLGRKNMDNGISKRIVTNQMAVLWHKRERQINGYISQTVGLLFKKVRACNVDTIVVGYNAGWKQKSDMGKKNNQTFVQIPFHKLMAAIENKCIKEGIRFVKQEESYTSKASFLDKDPVPVWSKDGKTHYCFSGKRITRGLYQSKAGTCIHADINGALNTLKKSKVVELDGNLKVKTPILLEVQKRKAVASRIA

SEQ ID NO: 5267 - protein, 451 aa, unidentified
MARKKAVKVLRKQKKRETIQRFTQKQNIGRACLTAKEFRLLQRMSHSSKALRNVGLYTIKQSYLNNNKMATVKEVDIAMQADMNYSGIQSNSVQAIRRALYAEVKSFFKALEQWKKNPEKFTGRPKFPNYSRSTDKRIIEIYQVPKVDDNGYWMIPMNVAFRKKFGSIKIRMPKNLRNKKISYIEIVPKQKGRFFEVHYTYEMHVPQMKKQSTTTSNALSCDLGVDRLVSCVTNTGDAFLIDGKKLKSINQYFNKKIRNLQQKNIENGLSKRVVTNKMAALWHKRERQINGYISQTVGLLFKKVKACNIDTVVVGYNAGWKQKSDMGKKNNQKFVQIPFHKLIAAIENKCVKEGIRFLKQEESYTSKASFLDKDPIPVWSKDDRTHYRFSGKRITRGLYQSKAGTCIHADINGALNTLKKSRVVELDDNLKVKTPILLEVQKRKAVASCIA

SEQ ID NO: 5268 - protein, 451 aa, unidentified
MARKKAVKVLRKQKKREKIQRFTQKQNIGRACLTAKEFRLLQRMSHSSKALRNVGLYTIKQSYLNHNKMATVNEVDTAMQADMNYSGIQSNSVQAIRRALFTEVKSFFKALEQWKKNPETFTGRPKFPNYSPSTDKRIIEIYQVPKVDENGYWIIPMSVAFRKKFGSIKIRMPKNVRNKKISYIEIVPKQKGRFFEVHYTYEMHVSQMKKQSATTSNALSCDLGVDRLVSCVTNTGDAFLIDGKKLKSINQYFNKMICNLQQKNMENGISKRVVTNKVAALWHKRERQINGYISQTVGLLFKKVKAFDIDTIVVGYNTGWKQKSDMGKKNNQTFVQIPFHKLIAAIENKCVKEGIRFLKQEESYTSKASFLDKDPVPVWSKDDRTHYRFSGKRITRGLYQSKAGTCIHADINGALNTLQKSRVVELDDNLKVKTPILLEVQKRKAVASRIA

SEQ ID NO: 5269 - protein, 451 aa, unidentified
MARKKAVKVLRKQKKRENIQRFTQKQNIGRACLTAKEFRLLQRMSHSSKALRNVGLYTIKQSYLNNNKMATVKEVDTAMQADMNYWGIQSNSVQAIRRSLFTEVKSFFKGLEQWKKKPETFAGRPKFPNYSGSTDKRIIEIYQVPKVDDNGYWMIPMNVAFRKKFGSIKIRMPKNVRNKKISYIEIVPKQKGRFFEVHYTYEMHVSQMKKPSTTTSNALSCDLGVDRLLSCVTNTGDAFLIDGKKLKSINQYFNKMIRNLQLKNVENGLSKRVVTNKMAALWHKRERQINGYISQTVGLLFKKVKACNIDMVVVGYNTGWKQKSDMGKKNNQKFVQIPFHKLIAAIENKCIKEGIRFLKQEESYTSKASFLDKDKIPVWSKEDRTHYRFSGKRITRGLYQSKSGTCIHADINGALNTLQKSRVVELDENLKVKTPILLEVQKRKAVASRIA

SEQ ID NO: 5270 - protein, 451 aa, unidentified
MARKKAVKVLRKQKKRENIQRFTQKQNIGRACLTAKEFRLLQRMSHSSKALRNVGLYTIKQSYLNNNKMATVKEVDTAMQADMNYWGIQSNSVQAIRRSLFTEVKSFFKGLEQWKKKPETFAGRPKFPNYSGSTDKRIIEIYQVPKVDDNGYWMIPMNVAFRKKFGSIKIRMPKNLRNKKISYIEIVPKQKGRFFEVHYTYEMHVSQMKKPSTTTSNALSCDLGVDRLLSCVTNTGDAFLIDGKKLKSINQYFNKMIRNLQLKNVENGLSKRVVTNKMAALWHKRERQINGYISQTVGLLFKKVKACNIDMVVVGYNTGWKQKSDMGKKNNQKFVQIPFHKLIAAIENKCIKEGIRFLKQEESYTSKASFLDKDKIPVWSKEDRTHYRFSGKRITRGLYQSKSGTCIHADINGALNTLQKSRVVELDENLKVKTPILLEVQKRKAVASRIA

SEQ ID NO: 5271 - protein, 451 aa, unidentified
MARKKAVKVLRKQKKRETMQRFTQKQNIGRACLTAKEFRLLQRMSHSSKALRNVGLYTIKQSYLNNNKMATVKEVDTAMQTDMNYWGIQSNSVQAIRRALFTEVKSFFKAMEQWKKKPETFTGRPKFPNYSRSTDKRIIEIYQVPKVDNNGYWMIPMNVAFRKKFGSIKIRMPKNVRNKKISYIEIVSKQKGRFFEVHYTYEMHVSQMKKQSTTTSNALSCDLGVDRLVSCATNTGDAFLIDGKKLKSINQYFNKMIRNLQLKNVENGLSKRVVTNKMAALWHKRERQINGYISQTVGLLFEKVKACNIDTVVVGYNAGWKQKSDMGKKNNQKFVQIPFHKLIAAIENKCIKEGIRFLKQEESYTSKASFLDKDRVPVWDKDDRTHYRFSGKRITRGLYQSKAGTCIHADINGALNTLEKSKIVQLDDNLKVKTPILLKVQKRRAFASRIA

SEQ ID NO: 5272 - protein, 451 aa, unidentified
MAKKKAVKVLRKLKKRENLQRFTQKQNIGRACFTAKEYRLLQRMSHSSKALRNVGLYTIKQSYLKHNKMATVKEVDTAMQADMNYSGIQSNSVQAIRRALFTEVKSFFKALEQWKKKPETFAGRPRFPNYSGPTDKRIIEIYQVPKVDDNGYWMIPMNVAFRKKFGSIKIRMPKNVRNKKISYIEIVPKQKGRFFEVHYTYEMHVSQMKKQSTTTSNALSCDLGVDRLLSCVTNTGDTFLIDGKKLKSINQYFNKMIRNLQQKNMDNGISKRIVTNKMAALWHKRERQINGYISQTVGLLFKKVKACNIDTVVVGYNAGWKQKSDMGKKNNQKFVQIPFHKLIAAIENKCVKEGIRFLKQEESYTSKASFLDKDRVPVWSKNDRTHYRFSGKRITRGLYQSKTGTCIHADINGALNTLKKSRVVQLDENLKVKTPILLEVQKRKAVASCIA

SEQ ID NO: 5273 - protein, 451 aa, unidentified
MAKKKAVKVLRKQKKRETLRRFTQKQNIGRACLTAQEFRLLQRMSHSSKALRNVGLYTMKQSYLNHNKMATVKEVDTAMQADMNYWGIQSNSVQAIRRALFTEVKSFFKALEQWKKNPEKFTGRPKFPNYSHSTDKRIIEIYQVPKVDENGFWMIPMSVAFRKKFGSIKIRMPKNLRNKNISYIEIVPKQKGRFFEVHYTYEMHVSQMKKQPMTTSNALGCDLGVDRLVSCVTNTGDAFLIDGKKLKSINQYFNKTIRNLQQKNVENGLSKRIVTNKIAALWHTRERQIHGYIAQTVGLLFKKVKEFDIDTIVVGYNAGWKQNSHMGKKNNQKFVQIPFHKLIAAIENKCIKEGIRFFKQEESYTSKASFLDKDPVPVWSKDDRTQYHFSGKRITRGLYQSKAGTCIHADINGALNTLQKSQIVELDGNLKVKTPILLEVQKRKAVASRIA

SEQ ID NO: 5274 - protein, 451 aa, unidentified
MARKKAVKVLRKQKKRENMQRFTQKQNIGRACLTAKEFRLLQRMSHSSKALRNVGLYTIKQSYLNNNKMATVKEVDTAMQADMNYWGIQSNSVQAIRRALFTEVKSFFKAWEQWKKKPETFTGRPKFPNYSHSTDKRIIEIYQVPKVDDNGYWMIPMNVAFRKTFGSIKIRMPKNLRNKKISYIEIVPKQKGRFFEVHYTYEMHVSQMKKQSTTTSNALSCDLGVDRLLSCVTNTGDTFLIDGKKLKSINQYFNKMIRNLQQKNMENGLSKRVVTNKMAALWHKRERQINGYISQTVGLLFKKVKACNIDTVIVGYNTGWKQESDMGNKNNQKFVQIPFHKLISAIENKCVKEGIRFLKQEESYTSKASFLDKDRIPVWSKDDRTHYRFSGKRMTRGLYRSKSGKCIHADINGALNTLQKSRVVELDENLKVKTPILLEVQTRKAVASCIA

SEQ ID NO: 5275 - protein, 451 aa, unidentified
MARKKVVKVLRKQKKRETMQRFTQKQNIGRACLTAKEFRLLQRMAHSSKALRNVGLYTIKQSYLNDNKMATVKEVDNAMQADMNYSGVQSNSVQAIRRALFTEMKSFFKALEQWKKHPDKFTGRPKFPNYSRSTDKRIIEIYQVPKVDENGYWMVPMNVAFRKKFGSIKIRMPKNLRNKNISYIEIVPKQKGRFFEVHYTYEMHVSQVKKQPTTTSNALSCDLGVDRLVSCVTNTGYAFLIDGKKLKSINQYFNKTIRNLQLKNMENGLSKRLVTNKIAALWHKRERQINGYIAQTVGLLFKKVKEFDIDTIVVGYNAGWKQKSHMGKKNNQTFVQIPFEKLMAAIENKCIKEGIRFFKQEESYTSKASFLDKDPVPVWSKDDKTQYRFSGKRITRGLYQSKAGTCIHADINGALNTLKKSKIVELDDNLKVKTPILLEVQKRKAIASRIA

SEQ ID NO: 5276 - protein, 451 aa, unidentified
MARKKAVKVLRKQKKREKMQRFTQKQNIGRTILTAKEFRLLERMSHSSKALRNVGLYTMKQSYLNNNRMANVKEVDTAMQADMNYSGVQSNSVQAIRRALFTEVKSFFKAMEQWKKHPDKFTGRPKFPNYSRSTDKRIIEIYKAPKVDDNGYWIIPMNVAFRKKFGSIKIRMPKNLRHKKISYIEIVPKQKGRFFEVHYTYEMHVSQMKKPSTTTSNALSCDLGVDRLVSCVTNTGDAFLIDGKKLKSINQYFNKTIRNLQQKNMENGLSKRVVTNKIAALWHNREKQINGYISQAVGLLFKKVKEFDIDTIVVGYNAGWKQKSHMGKQNNQKFVQIPFHKLIAAIENKCIKEGIRFLKQEESYTSKASFLDKDPVPVWSKDDRTQYRFSGKRITRGLYQSKAGTCIHADINGALNTLKKSKIVELDENLKVKTPILLEVQKRKAVTSRIA

SEQ ID NO: 5277 - protein, 451 aa, unidentified
MTKKRAVKVLRKQKKRENMQRFTQKQNIGRACLTAKEFRLLQRMSHSSKALRNVGLYTIKQSYLNNNKMATVKEVDTAMQTDMNYWGIQSNSVQAIRRALFTEVKSFFKAMEQWKKKPETFTGRPKFPNYSRSTDKRIIEIYQVPKVDNNGYWMIPMNVAFRKKFGSIKIRMPKNLRNKKISYIEIVPKQKGRFFEVHYTYEMHVSQMKKQPTTISKALSCDLGVDRLLSCVTNTGDAFLIDGKKLKSINQYFNKMIRNLQLKNMENGLSKRVVTNKMAALWHKRERQINGYISQTVGLLFEKVKAFNIDTVVVEYNAGWKQKPDMGKKNNQKFVQIPFHKLIAAIENKCIKEGIRFLKQEESYTSKASFLDKDRVPVWDKDDRTHYRFSGKRITRGLYQSKAGKCIHADINGALNTLEKSRVVELDDNLKVKTPILLEVQKRKAVASCIA

SEQ ID NO: 5278 - protein, 451 aa, unidentified
MAKKKAVKVLRKLKKRENLQRFTQKQNIGRACFTAKEYRLLQRMSHSSKALRNVGLYTIKQSYLKHNKMATVKEVDTAMQADMNYSGIQSNSVQAIRRALFTEVKSFFKALEQWKKKPETFAGRPRFPNYSGPTDKRIIEIYQVPKVDDNGYWMIPMNVAFRKKFGSIKIRMPKNVRNKKISYIEIVPKQKGRFFEVHYTYEMHVSQMKKQSTTTSNALSCDLGVDRLLSCVTNTGDTFLIDGKKLKSINQYFNKMIRNLQQKNMDNGISKRIVTNKMAALWHKRERQINGYISQTVGLLFKKVKACNIDTVVVGYNAGWKQKSDMGKKNNQKFVQIPFHKLIAAIENKCVKEGIRFLKQEESYTSKASFLDKDRVPVWSKDDRTHYRFSGKRITRGLYQSKTGTCIHADINGALNTLKKSRVVQLDENLKVKTPILLEVQKRKAVASCIA

SEQ ID NO: 5279 - protein, 451 aa, unidentified
MARKKAVKVLRKQKKRENIQRFTQKQNIGRACLTAKEFRLLQRMSHSSKALRNVGLYTIKQSYLNNNKMATVKELDTAMQADMNYWGIQSNSVQAIRRSLFTEVKSFFKGLEQWKKKPETFAGRPKFPNYSGSTDKRIIEIYQVPKVDDNGYWMIPMNVAFRKKFGSIKIRMPKNVRNKKISYIEIVPKQKGRFFEVHYTYEMHVSQMKKPSTTTSNALSCDLGVDRLLSCVTNTGDAFLIDGKKLKSINQYFNKMIRNLQLKNVENGLSKRVVTNKMAALWHKRERQINGYISQTVGLLFKKVKACNIDMVVVGYNTGWKQKSDMGKKNNQKFVQIPFHKLIAAIENKCIKEGIRFLKQEESYTSKASFLDKDKIPVWSKEDRTHYRFSGKRITRGLYQSKSGTCIHADINGALNTLQKSRVVELDENLKVKTPILLEVQKRKAVASRIA

SEQ ID NO: 5280 - protein, 451 aa, unidentified
MVKKKAVKVLRKQKKRENIQRFTQKQNIGRACLTAKEFRLLQRMSHSSKALRNVGLYTIKQSYLNHNKMATVKEVDNAMQADMNYWGIQSNSVQAIRRALFTEVKSFFKAWEQWKKNPETFTGRPKFPNYSRSTDKRIIEIYQVPKVDDNGYWMIPMNVAFRKKFGSIKIRMPKNLRNKKISYIEIVPKQKGRFFEVHYTYEMHVSQMKQQSTTTSNALSCDLGVDRLLSCVTNTGDTFLIDGKKLKSINQYFNKKIRNLQQKNIENGISKRVVTNRMAALWHKRERQVNGYISQTVGLLFKKVKAFDIDTIVVGYNTGWKQKSDMGKKNNQKFVQIPFHKLIAAIENKCIKEGIRFLKQEESYTSKASFLDKDPIPVWSKDDRAHYRFSGRRITRGLYQSKAGTCIHADINGALNTLEKSRVVELDDNLKVKTPILLEVQKRKAVASRIA

SEQ ID NO: 5281 - protein, 451 aa, unidentified
MARKKAVKVLRKQKKRENIQRFTQKQNIGRACLTAKEFRLLQRMSHSSKALRNVGLYTIKQSYLNDNKMATVKEVDTAMQADMNYSGIQSNSVQAIRRALFTEVKSFFKALEQWKKKPKTFTGRPKFPNYSRSTDKRIIEIYQVPKLDDNGYWMIPMNVAFRKKFGSIKIRMPKNVRNKKISYIEIVPKQKGRFFEVHYTYEMHVSQMKKQSTTTSNALSCDLGVDRLVSCATNTGDAFLIDGKKLKSINQYFNKMIRNLQLKNMENGLSKRVVTNQMAALWHKRERQINGYISQTVGLLFKKVKACNIDTVVVGYNTGWKQKSDMGKKNNQKFIQIPFHKLIAAIKNKCIKEGIRFLKQEESYTSKASFIDKDKIPVWSKDDRTHYRFSGKRITRGLYQSKAGTCIHADINGALNTLQKSRVVELDENLKVKTPILLEVQKRKAVASRIA

SEQ ID NO: 5282 - protein, 451 aa, unidentified
MARKKVVKVLRKQKKRETMQRFTQKQNIGRACLTAKEFRLLQRMAHSSKALRNVGLYTIKQSYLNDNKMATVKEVDNAMQADMNYSGVQSNSVQAIRRALFTEMKSFFKALEQWKKHPDKFTGRPKFPNYSRSTDKRIIEIYQVPKVDENGYWMVPMNVAFRKKFGSIKIRMPKNLRNKNISYIEIVPKQKGRFFEVHYTYEMHVSQVKKQPTTTSNALSCDLGVDRLVSCVTNTGYAFLIDGKKLKSNNQYFNKTIRNLQLKNMENGLSKRLVTNKIAALWHKRERQINGYIAQTVGLLFKKVKEFDIDTIVVGYNAGWKQKSHMGKKNNQTFVQIPFEKLMAAIENKCIKEGIRFFKQEESYTSKASFLDKDPVPVWSKDDKTQYRFSGKRITRGLYQSKAGTCIHADINGALNTLKKSKIVELDDNLKVKTPILLEVQKRKAIASRIA

SEQ ID NO: 5283 - protein, 461 aa, unidentified
MSPLRKTVKTMARKKAVKVLRKQKKREIIQRFTQKQNIGRTCLTAKEFRLLQRMSHSSKALQNVGLYTIKQSYLNHNKMATIREVDTAMQADMNYWGIQSNSVQAIRRALFTEVKSFFKALEQWKKKTEQFTGRPKFPNYSRSTDKRIIEIYQVPKVDENGYWMIPMNVAFRKKFGSIKIRMPKNLRNKNISYIEIVPKQKGRFFEVHYTYEMHVSQMKKPPTTTSNALSCDLGVDRLLSCVTNTGDAFLMDGKKLKSINQYFNKMICNLGQKNMDNGISKRIVTNKMAALWHKRERQINGYIAQTVGLLFKKVKEFDIDTIVVGYNAGWKQNSHMGKKNNQKFVQIPFQKLIAAIENKCVKEGIRFFKQEESYTSKASFLDKDPVPVWSKDDKTQYRFSGKRITRGLYQSKAGTCIHADINGALNTLKKSGVVELDGNLKVKTPILLEVQKRKAIALCIA

SEQ ID NO: 5284 - protein, 451 aa, unidentified
MARKKAVKVLRKQKKREKMQRFTQKQNIGRTILTAKEFRLLERMSHSSKALRNVGLYTMKQSYLNNNRMATVKEVDTAMQADMNYSGVQSNSVQAIRRALFTEVKSFFKAMEQWKKHPDKFTGRPKFPNYSRSTDKRIIEIYKAPKVDDNGYWIIPMNVAFRKKFGSIKIRMPKNLRHKKISYIEIVPKQKGRFFEVHYTYEMHVSQMKKPSTTTSNALSCDLGVDRLVSCVTNTGDAFLIDGKKLKSINQYFNKTIRNLQQKNMENGLSKRVVTNKIAALWHNREKQINGYISQAVGLLFKKVKEFDIDTIVVGYNAGWKQKSHMGKQNNQKFVQIPFHKLIAAIENKCIKEGIRFLKQEESYTSKASFLDKDPVPVWSKDDRTQYRFSGKRITRGLYQSKAGTCIHADINGALNTLKKSKIVELDENLKVKTPILLEVQKRKAVTSRIA

SEQ ID NO: 5285 - protein, 451 aa, unidentified
MARKKAVKVLRKQKKRETMQRFTQKQNIGRACLTAKEFRLLQRMSHSSKALRNVGLYTIKQSYLNNNKMATVKELDTAMQADMNYWGIQSNSVQAIRRSLFTEVKSFFKGLEQWKKKPETFAGRPKFPNYSGSTDKRIIEIYQVPKVDDNGYWMIPMNVAFRKKFGSIKIRMPKNVRNKKISYIEIVPKQKGRFFEVHYTYEMHVSQMKKPSTTTSNALSCDLGVDRLLSCVTNTGDAFLIDGKKLKSINQYFNKMIRNLQLKNVENGLSKRVVTNKMAALWHKRERQINGYISQTVGLLFKKVKACNIDMVVVGYNTGWKQKSDMGKKNNQKFVQIPFHKLIAAIENKCIKEGIRFLKQEESYTSKASFLDKDKIPVWSKEDRTHYRFSGKRITRGLYQSKSGTCIHADINGALNTLQKSRVVELDENLKVKTPILLEVQKRKAVASRIA

SEQ ID NO: 5286 - protein, 451 aa, unidentified
MARKKAVKVLRKQKKRETMQRFTQKQNIGRACLTAKEFRLLQRMSHSSKALRNVGLYTIKQSYLNNNKMATVKEVDTAMQTDMNYWGIQSNSVQAIRRALFTEVKSFFKAMEQWKKKPETFTGRPKFPNYSRSTDKRIIEIYQVPKVDNNGYWMIPMNVAFRKKFGSIKIRMPKNLRNKKISYIEIVPKQKGRFFEVHYTYEMHVSQMKKQPTTISKALSCDLGVDRLVSCVTNTGDAFLIDGKKLKSINQYFNKMIRNLQLKNMENGLSKRVVTNKMAALWHKRERQINGYISQTVGLLFEKVKACNIDTVVVGYNAGWKQKSDMGKKNNQKFVQIPFHKLIAAIENKCIKEGIRFLKQEESYTSKASFLDKDRVPVWDKDDRTHYRFSGKRITRGLYQSKAGTCIHADINGALNTLEKSKIVQLDDNLKVKTPILLKVQKRRAFASRIA

SEQ ID NO: 5287 - protein, 451 aa, unidentified
MARKKAVKVLRKQKKRENMQRFTQKQNIGRACLTAKEFRLLQRMSHSSKALRNVGLYTMKQSYLNNNKMATVKEVDTAMQADMNYSGMQSNSVQAIRRALFTEVKSFFKAWEQWKKNPEKFTGRPKFPNYSRSTDKRIIEIYQVPKVDDNGFWMIPMNVAFRKKFRSIKIRMPKNLRNKKISYIEIVPKQKGRFFEVHYTYEMHVSQMKKPSTTTSNALSCDLGVDRLVSCVINTGDTFLIDGKKLKSINQYFNKMIRNLQLKNMDNGLSKRVVTNRMAALWHKRERQINGYISQTVGLLFKKVKAFGIDTVVVGYNAGWKQKSDMGKKNNQTFVQIPFHKLMAAIENKCVKEGIRFLKQEESYTSKASFLDKDPVPVWSEDDRIHYRFSGKRITRGLYQSKAGTCIHADINGALNTLQKSRVVQLDDTLKVKTPILLEVQKRKAVASRIA

SEQ ID NO: 5288 - protein, 451 aa, unidentified
MTRKKAVKVLRKQKKRETMQRFTQKQNIGRACLTAKEFRLLQRMSHSSKALRNVGLYTMKQSYLNHNKMATVKEVDTAMQADMNYWGIQSNSVQAIRRALYAEVKSFFKAMEKWKKNPEKFTGRPKFPNYSRPTDKRIIEIYQVPKVDDNGYWMIPMSVAFRKKFGCIKIRMPKNVRNKKISYIEIVPKQKGRFFEVHYTYEMHVSQMKKQSATTSNALSCDLGVDRLVSCVTNTGDTFLIAGKKLKSINQYFNKMIRNLQQKNIENGLSKRVVTNQTAALWHKRERQINGYISQTVGLLFKKVKAFGIDTIVVGYNVGWKQRSDMGKKNNQTFVQIPFHELIAAIENKCIKEGIRFLKQEESYTSKASFLDKDPVPVWSKDDKTYYRFSGKRITRGLYKSKAGTCIHADINGALNTLKKSRVVELDESLKVKTPILLEVQKRKAVASRIA

SEQ ID NO: 5289 - protein, 451 aa, unidentified
MTKKKAVKVLRKQKKRETLQRFTQKQNIGRACLTAKEFRLLQRMSHSSKALRNVGLYIIKQSYLNNNKMATVKEVDTAMQADMNYSGMQSNSVQAIRRALFTEVKSFFKAWEQWKKKPETFTGRPKFPNYSRSTDKRIIEIYQVPKVDDNGYWMIPMNVAFRKKFGSIKIRMPKNLRNKKISYIEIVPKQKGRFFEVHYTYEMHVSQMKKPSTTTSNALSCDLGVDRLLSCVTNTGDTFLIDGKKLKSINQYFNKMIRNLQQKNMDNGISKRIVTNQVAALWHKRERQINGYISQTVGLLFKKVKACNIDTVVVGYNAGWKQKSDMGKKNNQKFVQIPFHKLIVAIENKCVKEGIRFLKQEESYTSKASFLDKDSVPAWSKDDRTHYRFSGKRINRGLYQSRAGICIHADINGALNTLQKSKVVQLDDNLKVKTPILLEVQKRKAVASRIA

SEQ ID NO: 5290 - protein, 451 aa, unidentified
MAKKKAVKVLRKQKKRENMQRFTQKQNIGRACLTAKEFRLLQRMSHSSKALRNVGLYTIKQSYLNDNKMATVKEVDTAMQADMNYWGMQSNSVQAIRRALFTEVKSFFKALEQWKKKPETFTGRPKFPNYSRSTDKRIIEIYQVPKVDENGYWMIPMNVAFRKKFGSIKIRMPKNLRNKKISYIEIVPKQKGRFFEVHYTYEMHVPQMKKQSTTTSNALSCDLGVDRLVSCVTNTGDTFLIDGKKLKSINQYFNKMIRNLQLKNMENGLSKRVVTNKMAALWHKRERQINGYISQTVGLLFKKVKACNIDTVVVGYNAGWKQKSDMGKKNNQTFVQIPFHKLIAAIENKCVKEGIRFLKQEESYTSKASFFDKDRIPVWSKDDGTHYRFSGKRITRGLYQSKAGTCIHADINGALNTLQKSKVVELDDNLKVKTPILLEVQKRKAVASRIA

SEQ ID NO: 5291 - protein, 451 aa, unidentified
MARKKALKVLRKQKKRETMQRFTQKQNIGRACLTAKEFRLLQRMSHSSKALRNVGLYTMKQSYLNNNRMATVKEVDTAMQADTNYSGVQSNSVQAIRRAVFTEVKSFFKALEQWKKHPEKFTGRPKFPNYSRSTDKRIIEIYQVPKVDENGYWIIPMNVAFRKKFGSIKIRMPKNLRNKKISYIEIIPKQKGRFFEVHYTYEMHVSQMKKPPTTTSNALSCDLGVDRLVSCVTNTGDAFLIDGKKLKSINQYFNKMIRNLGRKNMDNGISKRIVTNQMAVLWHKRERQINGYISQTVGLLFKKVRACNVDTIVVGYNAGWKQKSDMGKKNNQTFVQIPFHKLMAAIENKCIKEGIRFVKQEESYTSKASFLDKDPVPVWSKDGKTHYCFSGKRITRGLYQSKAGTCIHADINGALNTLKKSKVVELDGNLKVKTPILLEVQKRKAVASRIA

SEQ ID NO: 5292 - protein, 451 aa, unidentified
MARKKAVKVLRKQKKRETMQRFTQKQNIGRACLTAKEFRLLQRMSHSSKALRNVGLYTMKQSYLNHNRMATVKEVDTAMQNDMNYSGIQSNSVQAIRRALFTEGKSFFKALEQWKKNPEKFTGRPKFPNYSRSTDKRIIEIYQVPKVDENGYWMIPMNVAFRKKFGSIKIRMPKNLRNKNISYIEIVPKQKGRFFEVHYTYEMHVSQMKKPPTTTSNALSCDLGVDRLVSCVTNTGDAFLIDGKKLKSINQYFNKMICNLQQKNMDNGIAKRIVTNKIAALWHKRERQINGYIAQTVGLLFKKVKEFDIDTIVIGYNAGWKQKSHMGKKNNQKFVQIPFQKLIAAIENKCVKEGIRFFKQEESYTSKASFLDKDPVPVWSKDDKTQYRFSGKRITRGLYQSKAGTCIHADINGALNILKKSGVVELDDNLKVKTPILLEVKKRKAVTSRIA

SEQ ID NO: 5293 - protein, 440 aa, unidentified
MARKKAVKVLRKQKKRKTMQRFTQKQNIGRACLTAKEFRLLRRMSHSSKALRNVGLYTMKQSYLNDNKMATVKEVDTAMQADMNYWGMQSNSVQAIRRALFTEVKSFFKAMEQWKKNPEKFTGRPKFPNYSRSTDKRIIEIYQVPKVDESGYWIIPMNIAFRKKFGSIKIRMPKNLRHKKISYIEIVPKQKGRFFEVHYTYEMHISQMKKPSTTTSNALSCDLGVDRLVSCVTNTGDAFLIDGKKLKSINQYFNKVIRNLQLKNVENGLSKRIVTNKMAVLWHKRERQINGYISQAVGLLFKKVKEFDIDTIVVGYNTGWKQKSDIGKKNNQKFVQIPFQKLIAAIENKCIKEGIRFLKQEESYTSKASFLDKDPVPVWSKDDKMQYLFSGKRITRGLYQSKAGTCIHADINGALNTLQKSRVVELDENLKVRTPILLEV

SEQ ID NO: 5294 - protein, 341 aa, unidentified
MAKKKAVKVLRKQKKRETLRRFTQKQNIGRACLTAQEFRLLQRMSHSSKALRNVGLYTMKQSYLNYNKMATVKEVDTAMQADMNYWGIQSNSVQAIRRALFTEVKSFFKALEQWKKNPEKFTGRPKFPNYSHSTDKRIIEIYQVPKVDENGFWMIPMSVAFRKKFGSIKIRMPKNLRNKNISYIEIVPKQKGRFFEVHYTYEMHVSQMKKQPMTTSNALGCDLGVDRLVSCVTNTGDAFLIDGKKLKSINQYFNKTIRNLQQKNVENGLSKRIVTNKIAALWHKRERQIHGYIAQTVGLLFKKVKEFDIDTIVVGCNAGWKQNSHMGKKNNQKLFKSRSIN

SEQ ID NO: 5295 - protein, 451 aa, unidentified
MARKKAVKVLRKQKKRETMQRFTQKQNIGRACLTAKEFRLLQRMSHSSKALRNVGLYTIKKSYLNHNKMATVKEVDTAMQADLNYSGIQSNSVQAIRRALFTEVKSFFKALEQWKNKPETFTGRPKFPNYSGSTDKRIIEIYQVPKVDDNGYWLIPMNVAFRKKFGSIKIRMPKNLRNKKISYIEIVPKQKGRFFEVHYTYEMHVSQMKKQSTTTSNALSCDLGVDRLLSCVTNTGDAFLIDGKKLKSINQYFNKMIRNLQLKNVENGLSKRVVTNKMAALWHKREKQINGYISQTVGLLFKKVKAFNIDTVVVGYNTGWKQKSDMGKKNKQKFVQIPFHKLIAAIENKCVKEGIRFLKQEESYTSKASFLDKDRVPVWSKDDRTHYRFSGKRITRGLYRSKSGKCIHADINGALNTLEKSRVVELDENLKVKTPILLEVQKRKAVASCIA

SEQ ID NO: 5296 - protein, 451 aa, unidentified
MARKKAVKVLRKQKKRENMQRFTQKQNIGRACLTAKEFRLLQRMSHSSKALRNVGLYMIKQSYLDHNKMATVKEVDTAMQADMNYWGMQSNSVQAIRRALFTEVKSFFKALKQWKKNPEKFTGRPKFPNYSRSTDKRIIEIYQVPKVDEKGYWMIPMNVAFRKKFGSIKIRMPKNVRNKKISYIEIVPKQKGRFFEVHYTYELHVSQMKKQSTTTSNALSCDLGVDRLVSCATNTGDTFLIEGKKLKSINQYFNKMIRNLQQKNVENGISKRVVTNKMAALWHKRERQINGYISQTVGLLFKKVKAFGIDTVVVGYNAGWKQKSDMGKKNNQKFVQIPFYKLIAAIENKCIKEGIRFFKQEESYTSKASFLDKDPVPVWSKDDKMHYLFSGKRMTRGLYQSKAGTCIHADINGALNTLQKSRVVQLDDNLKVKTPILLEVQKRKAVASRIA

SEQ ID NO: 5297 - protein, 451 aa, unidentified
MTRKKAVKVLRKQKKRETMQRFTQKQNIGRACLTAKEFRLLQRMSHSSKALRNVGLYTMKQSYLNHNKMATVKEVDTAMQADMNYWGIQSNSVQAIRRALYAEVKSFFKAMEKWKKNPDKFTGRPKFPNYSRPTDKRIIEIYQVPKVDDNGYWMIPMSVAFRKKFGSIKIRMPKNVRNKKISYIEIVPKQKGRFFEVHYTYEMHVSQMKKQSATTSNALSCDLGVDRLVSCVTNTGDTFLIAGKKLKSINQYFNKMIRNLQQKNIENGLSKRVVTNQTAALWHKRERQINGYISQTVGLLFKKVKAFGIDTIVVGYNVGWKQRSDMGKKNNQTFVQIPFHELIAAIENKCIKEGIRFLKQEESYTSKASFLDKDPVPVWSKDDKTYYRFSGKRITRGLYKSKAGTCIHADINGALNTLKKSRVVELDESLKVKTPILLEVQKRKAVASRIA

SEQ ID NO: 5298 - protein, 451 aa, unidentified
MARKKAVKVLRKQKKRENMQRFTQKQNIGRACLTAKEFRLLQRMSHSSKALRNVGLYTIKKSYLNHNKIATVKEVDTAMQADMNYWGIQSNSVQAIRRALFTEVKSFFKAWEQWKKKPETFTGRPKFPNYSRSTDKRIIEIYQVPKVDDNGYWMIPMNVAFRKKFGSIKIRMPKNLRNKKISYIEIVPKQKGRFFEVHYTYEMHVSQMKKPSTTTSNALSCDLGVDRLLSCVTNTGDAFLIDGKKLKSINQYFNKMIRNLQQKNVKNGLSKRVVTNKMAALWHKRERQINGYISQTVGLLFKKVKACNIDTVVVGYNAGWKQKSDMGKKNNQTFVQIPFHKLLAAIENKCVKEGIRFLKQEESYTSKASFLDKDRIPVWSKDDRTHYCFSGKRITRGLYRSKSGQCIHADINGALNTLQKSRVIELDDNLKMKTPILLEVQKRKAVASCIA

SEQ ID NO: 5299 - protein, 451 aa, unidentified
MAKKKAVKVLRKLKKRENLQRFTQKQNIGRACFTAKEYRLLQRMSHSSKALRNVGLYTIKQSYLKHNKMATVKEVDTAMQADMNYSGIQSNSVQAIRRALFTEVKSFFKALEQWKKKPETFAGRPRFPNYSGPTDKRIIEIYQVPKVDDNGYWMIPMNVAFRKKFGSIKIRMPKNLRNKKISYIEIVPKQKGRFFEVHYTYEMHVSHMKKQSTTTSNALSCDLGVDRLLSCVTNTGDTFLIDGKKLKSINQYFNKMIRNLQQKNMDNGISKRIVTNKMAALWHKRERQINGYISQTVGLLFKKVKACNIDTVVVGYNAGWKQKSDMGKKNNQKFVQIPFHKLIAAIENKCVKEGIRFLKQEESYTSKASFLDKDRVPVWSKDDRTHYRFSGKRITRGLYQSKAGTCIHADINGALNTLKKSRVVQLDENLKVKTPILLEVQKRKAVASCIA

SEQ ID NO: 5300 - protein, 460 aa, unidentified
MYGTIQVKLNVSDEVMAYLVHQCQHSNSLINSTLFEVRQSHFEDCPRVEFFDANGFYRSEFKTKTVKAPYAHLCSVMKDNPHYKVLGGQCAQQTLKSVSESFTSFNKLLQLFFKGEVDKPRMPNYRTKGGLAPITFPAQALQFDIETGECRIPISQENAASVKEHFGLSELRINGAFGIKADQIVELRILPRNNEFYAEYVYKHGNDGATCHLGLDSTQALGIDPGLSNWLTCVSTRGKSFIVDGRKLKSINQNYNRRVASLKTGKPAKYWDFELARITEKRNRQIRDAINKAARLVINHCLENRIGHVVFGWNEGNKDGINIGAKNNQEFVQIPTSRLKNRIKQLCEESGIQFTETEESYTSKASFIDEDFLPTYGEKPASWKPSGKRIKRGQYKTAQSILINADCNGAANILRKVSAQLGIVLTESVRAVLTLPKRYDLFKGLKKSYRKRCEASLQSA

SEQ ID NO: 5301 - protein, 413 aa, unidentified
MYLTQKNQIRGLKANEFTALKELCRLSKNLYNVGLYTVRQYYFQERKHLKYESNYHYCKGNENYRMLNTDIAQQTLKVVDRTFRSFYGLITSVKSGSYSSKVRLPHYLPKEGYFPLIMPRVKVKDGKFRIPMSTAFKAQSGEIWIPFPNRLNQETLKEVRILPKYNGRFFEVEFISEAEETPIETKAESAIGIDLGLDNLATCIDTNGASFILDGKPLKSFNQWFNKENARLQSIKDLQKIKGTTERQARLAVNRNAKIRDYLNKAARYVINHCIEHRIDKLVVGFNIEMKQSINIGSRNHQNFVQIPHSSFRFKLKALCERYGIKYVEQEESYTSKASFLDNDNIPVFNADNPKKHEFSGKRIQRGLYRTQFGILVNADCNGAANILKKSKHNALSGVSSGCLAQPLRVKIS

SEQ ID NO: 5302 - protein, 430 aa, unidentified
MYGCQQTLIHAPPDVQAIIEYLCTESNKVWNCSVYYARQIYFKTGKVIKRAEICAEMFRSKNKHFGAMYVSSAQQTCNNVAEAFKSFQELTKLWKRGELPDKPSLPKYRKTGLFTVTYPKRWLKLTDDGIRIPLGNQVKTWFGVDAIYLPMPSNLKWEDIKELRILPRNRCFYAEFVYPTEDVKSQLNKSRVLGIDHGIDNWLTCVSNVGTSFIIDGKHLKSLNQWYNKRVATLKENKEQGFWSKQLATITEKRNRQMRDAVNKAARLVINHCLENSIGRIVFGWNQRQKDSANMGRKANQKFVQIPTAKLKERIFQLSQQYGIDFVETEEANTSAASFVDSDSLPKYGEKPEDWKSSGKRVKRGLFRTASNWYINADANGAANIISKVAATLGINLSGVSRGALTTPLRVHLWTLKNPPTFCLNERSEI

SEQ ID NO: 5303 - protein, 426 aa, unidentified
MSNYGCQQILIHPDKDLKALLEYVCTEANNLINCGVYYSRQYYFKTGKFPSKADLHKQLGTVQRNKHYQALYSDTAQQILTSVAESFKSFVGLLKGIKKGTVTQKPRLPNYRKSGGLALATFTGRSLKLKDGMIRFPLGTLVKTWFGVDGFYLPMPTNLDFKSIREVRILPRNRCFYAEFVYQSDDAVCQVDKSKVLGIDHGINNWLTCVSNIGTSFIVDGLHLKTLNQWYNKSVAKIKENKPQEFWSNRLAAITEKRNRQMRDAVNKAARIVINHCIDNQIGSIVFGWNQGQKDGADMGKNNNQKFVQIPTAKLKNRIEQLCEQYGIVFIETEESYTSKASFLDNDVLPTFGAKPERWKSSGIRTNRGVFKTGTGIKINADCNGAANIIQKVAVMAGFNLAGISRGCLSQPKKVLLWTLQKSQCL

SEQ ID NO: 5304 - protein, 430 aa, unidentified
MNYGCQQILISPDKNTKALLEYVCTEANNLINCGVYYSRQYYFKTGKFPSKVDLHKQIGTIQKNKHYQALYSDTAQQILTGVAESFKSYVGLVKGIKKGTVTQKPRLPNYRTSGGLVLATFTGRSLKLKDGLIRFPLGSLVKTWFGVDGFYLPIPTNLDFKSIREVRILPRNRCFYAEFVYQSPNVVVNLDKTKVLGIDHGLNNWLTCVSNVGTSFIVDGLHLKSLNQWYNKSVAKIKENKPQGFWSNKLAALTEKRNRQMRDAVNKAARIVINHCLDNKIGSIVFGWNQGQKDGANMGKKNNQKFVQIPTAKLKNRIEQLCEQYGIEFIETEESYTSKTSFLDNDVLPKFGAKPEGWKSSGVRTNRGLFKTGTGIKINADCNGAANIIRKVATMTKFDLVGVCRGCLSQPKKVRLWTLQKSPRLQTGEA

SEQ ID NO: 5305 - protein, 422 aa, unidentified
MQLTERHIIKSTEHRFAQIDELAFKSKNLYNAANYVIRQSFIYGWGYVNYNETNRLMKSHEAYKALPAKVSQQILMVLDKNWKSFFEAVKAYKADSSRFTGRPKLPKYKDKVKGRNLLVYTIQAISSKQLKKGVIKLSGTELSMKTQLNPNQICQVRLVPKCDSYVMEVIYDEPESTLGNANSVASIDLGLDNLVALTSNQPGFIPLLINGRPLKSINQFYNKRKSRLQSQLKGNRKTSPRIQRLTRCRNQKVDNYLHHASRVIVDHLVANKIGTLVIGQNAQWKTDINLGKQTNQNFVSIPHSRLIEMLEYKARLVGITVIVQEESYTSRSSFLGLDPIPVYGKTAKEPMFTGKRIKRGLYKTSTGQLINCDINASYNILRKAIPNAFSDGIESCVVGPMRVNPLKVKAKGEGLEASHAYK

SEQ ID NO: 5306 - protein, 422 aa, unidentified
MQLTERHIIKSTSHRFAQIDELAFKSKNLYNAANYVIRQSFIYGWKYVNYNEMNRLMKSHEAYKNLPAKVSQQILMVLDRNWKSFFEAIKAYKADPSKFTGRPKLPKYKDKVKGRNLLVYTIQAISSKQLRNGVIKLSGTNLSIKTKVSPDRICQVRLIPKCDAYVIEVIYDEPESTVKESSFVAGIDLGLNNLVALTSNQPGFVPLLINGRPLKSIDQFYNKRKAQLQSQLKGNCKTSPRIQRLTRCRNQKIANYLHQASRIIVDFLVAQQIGTLVVGKNEQWKTEINLGKQTNQNFVSIPHARLIEMLEYKAFLAGIKVIVQEESYTSRANFLGLDPIPVYGKTEKEPVFTGRRIKRGLYKTSTDQLINSDVNGSFNIIRKAIPNAFSDGIGSCVVQPRRVNPLKVKAKGEGLEASHVYR

SEQ ID NO: 5307 - protein, 465 aa, unidentified
MEDLKPNYQTQKILLSGNVSDETESYLIWACHLSNNLSNSTLFSVRQAHFARCPRREFFDKNDFYRSEFKDRYVSVSYAQLCKDFKFNHNYIGLGGQQAQQCIKSVVESIQSYNQLLKKYWQKEIDIKPKLPNYRKSGGLNQVTFPSQAVTYNKYEGYCSLAISNEARPNLEIKKLIIPSGVDFKPEQLVEVRITPSNGKLWAEYVYKSDKKQANDLDYSQAIGLDPGVNNWLTGVSTLGKSFILCGKKIKSINQKYNKLVAKYKKGKSNFSWDSFLANLTHKRNCQRRDVVNKAARFIINYCLVNKIGNIVFGWGKEIKQNSNLGKINNQNFVAIPTARLKKRIKELAEAIGIKFIETEEAYTSKSDYLAEDCLFKFGEKPEQYRFSVRRITRGNYRSKFGIICADALGAINIIKKVAIQLGISLVEVGRESLIVPKRYDLFSNLKKLYRKRSEMVLRLSRSNA

SEQ ID NO: 5308 - protein, 458 aa, unidentified
MNYKTIRILLTNNISDECNDYLQFTCEQSNKLYNSTVFLIRQSHFEDCPRNIYFDKNDLLRSSFKLRKVKANYPNLCKELKTNVHYQAIGGSQGQQTIKSVAEAFKAYNQLLSLWFKGEIEHKPKMPSYRKNGLYAVSFTKQQIKITIDGYCRLPIPKTQKDELVTKELIIPSAKGVNSHNIAEVRIVPSLGKLWAEFVYKTPEVKATELNYSQALGIDTGVSNLITAVSTKGKSFILCGKRLKFINQKYNKTVAQYKNGKSEFYWDEFLDEITHKRNCQVKDSINKYARFIINYCLNNRIGDIVFGWGQGVKSNANLGKGNNQNFVQLPTVRLKNRIKELADEVGIRFTETEESYTSKSSFLDNDLLPKYGEKPREYKFSGKRINRGLYKTAKSYLINADCNGAINILKKVSTQLGITLAEVSKEALTLPKRYNVNSLTKVYRKRSEQVLTCVATSA

SEQ ID NO: 5309 - protein, 459 aa, unidentified
MDYKTVKVLLTNNINDECNDYLQFACEQSNKLYNSTVYALRQAHFANCSIRTFFDKEDLYRASFKLGKVKVSYPQLCKDLKINDHYQAIGGNQGQQTIKSVVESFKSYNKLLSMWFQGELSNKPKLPNYRKNGLYQISFVGRDIKFAKDGLSCYLPIPRSQKDELITGKLNIPCAKGVTADNIAELRIVPSLGKLWAEYVYKAPEKKATELDYSQAIGIDSGINNFITAVSNTGKSFILCGKHLKFINQKYNKTVAQYKEGKSDFYWDDYLNEITHKRNCQIKDSVNKYARFVINYCLNHRIGNIVFGWGQGVKSEVNLGKRNNQNFVQLPTARLKNRIKELAHEVGIKFAETEESYTSKSSFLDEDLLPKYGEKPKECKFSGKRVQRGLYRTSNGQTINADCLGAINILKKVSIQLGLNLAEVCRGALTLPKRYRVNDLTKVYRKRSEQVLTCVATSA

SEQ ID NO: 5310 - protein, 459 aa, unidentified
MYYKTVKTLLTNNIDDECHAYLKFACEQSNKLYNVAVYVVRQAHFEQCLVKTFFDKNDLYRTSLKLSKVKVSYPQLCKELQNNSHYQAIGGSQAQQTIKSSVEGFKAYNKLLPMWFKGELLNKPKLPTYRKNGMYPVVFTGQNLRFTADGKHCYISIPKSQKDELITGRLSIPCGKGITKDNIAELRIIPSNGKLWAEFVYKSPEQKATGLDYSQAMGIDSGVSNLLTVVSTEGKSFILCGKRLKFTNQKYNKFVAKYKEGKSEFYWDENLDEVIHKRNCQIRDTVNKYARFLINYCLAHKIGNIVFGWGQGVKTEANLGKRNNQNFVQLPTARLKNRIKELAGEVGILFTETEESYTSKSSFLDGDLLPKYGEKPKEYKFSGKRVERGLYRISNGKTINADCNGAINILKKVSTQLGLDLAKVRRGALTLPKRYDVNNLAKSYRKHSEQVLTCVATSA

SEQ ID NO: 5311 - protein, 459 aa, unidentified
MDYKTVKVLLTNNINDECNDYLQFACEQSNKLYNSTVYALRQAHFANCSIRTFFDKEDLYRASFKLGKVKVSYPQLCKDLKINDHYQAIGGNQGQQTIKSVVESFKSYNKLLSMWFQGELSNKPKLPNYRKNGLYQISFVGRDIKFAMDGLSCYLPIPRSQKDELITGKLNIPCAKGVTADNIAELRIVPSLGKLWAEYVYKTPEKKATELDYSQAIGIDSGINNFITAVSNTGKSFILCGKHLKFINQKYNKTVAQYKEGKSDFYWDDYLNEITHKRNCQIKDSVNKYARFVINYCLNHRIGNIVFGWGQGVKSEVNLGKRNNQNFVQLPTARLKNRIKELAHEVGIKFAETEESYTSKSSFLDEDLLPKYGEKPKECKFSGKRVQRGLYRTSNGQTINADCLGAINILKKVSIQLGLNLAEVCRGALTLPQRYRVNDLTKVYRKRSEQVLTCVATSA

SEQ ID NO: 5312 - protein, 400 aa, unidentified
MKLVERHIISQNHPFWSEIDHYAFLSKNLFNLANYHYRQYFFENSQKLSFNQVYHLVSKTSDYLALPTKVSKQIIRRLDQAWISYFAAFRAWKKHPEKFLGKPKIIKYKDKTKGRNLLIYSQESIYKKPLKEGICHLSMSDLKITTSRREIIEVRIVPKSSCYVIEIVYERRSETTDKQEIAGIDLGVNNLMAVTTNQTGVAPLLVNGRPLKAINTFYNKQRSHLQSQLKTQNNQHSSKRLILLTHKRNCRVENYLHTASKRVIDWCIIHQIGTLIIGHNERIKQSLNLGKRNNQQFVNIPHYRLIEMLTYKAQLKGIKVIITEESYTSQSSALDRDELPKYGEEKPLFKGKRLTRGLYKMGTNQLLNADVNGSFNIIRKVIPDVIDQGIKGLPFKSCSA

SEQ ID NO: 5313 - protein, 451 aa, unidentified
MARKKAVKVLRKQKKRETMQRFTQKQNIGRACLTAKEFRLLQRMAHSSKALRNVGLYTIKQSYLNDNKMATVKEVDNAMQADMNYSGVQSNSVQAIRRALFTEMKSFFKALEQWKKHPDKFTGRPKFPNYSRSTDKRIIEIYQVPKVDENGYWIIPMNVAFRKKFGSIKIRMPKNLRNKKISYIEIVPKQKGRFFEVHYTYEMHVSQMKKQPTTTSNALSCDLGVDRLVSCVTTTGDTFLIDGKKLKSINQYFNKVIRNLQQKNMENGLSKRVVTNQMAALWHKRERQIHGYISQTVGLLFKKVKAFGIDTIVVGYNAGWKQKSDMGKKNNQKFVQIPFHKLIVAIENKCIKEGIRFVKQEESYTSKASFLDKDPVPVWSNGDKTHYLFSGKRITRGLYQSKAGTCIHADINGALNTLQKSRIVEWDDNLKVKTPILLKVQKRKAVASRIA

SEQ ID NO: 5314 - protein, 451 aa, unidentified
MARKKVVKVLRKQKKRETMQRFTQKQNIGRACLTAKEFRLLQRMSHSSKALRNVGLYTMKQSYLNHNRMATVKEVDTAMQADMNYPGVQSNSVQAIRRSLFTEVKSFFKALEQWKKHPEKFTGRPKFPNYSRSTDKRIIEIYQVPKVDENGYWIIPMNVAFRKKFGSIKIRMPKNLRNKNISYIEIVPKQKGRFFEVHYTYEMHISQMKKQSTTTSNALSCDLGVDRLVSCVTNTGDAFLIDGKKLKSINQYFNKIIRNLGQKNIENGLSKRVVTNRMAALWHKRERQINGYISQTVGLLFKKVKAYNIDTIVVGYNAGWKQKSDMGKKNNQTFVQIPFHKLMAAIENKCVKEGIRFVKQEESYTSKASFLDKDPVPVWSKDDRTQYRFSGKRITRGLYQSKAGTCIHADMNGALNTLKKSGVVELDENLKVKTPILLEVQKRKAIASRIA

SEQ ID NO: 5315 - protein, 451 aa, unidentified
MARKRAVKVLRKQKKRETMQRFTQKQNIGRACLTAKEFRLLQRMAHSSKALRNVGLYTIKQSYLNDNKMATVKEVDTAMQADMNYSGVQSNSVQAIRRALFTEMKSFFKALEQWKKHPEKFTGRPKFPNYSRSTDKRIIEIYQVPKVDEKGYWIIPMNVAFRKKFGSIQIRMPKNLRNKKISYIEIVPKQKGRFFEVHYTYEMHISQMKKQPTTTSNALSCDVGVDRLVSCVTNTGDAFLIDGKKLKSINQYFNKMIGNLQQKNVENGLSKRIVTNKIAALWHKRERQIHGYIAQTVGLLFKKVKEFDIDTIVVGYNAGWKQKSDMGKKNNQTFVQIPFHKLIAAIENKCVKEGIRFLKQEESYTSKASFLDKDPVPVWSRDDKTYYLFSGKRITRGLYQSKAGTCIHADINGALNTLQKSRVVELDENLKVKTPILLEVQKRKAVATRIA

SEQ ID NO: 5316 - protein, 451 aa, unidentified
MVKKKAVKVLRKQKKRENMQRFTQKQNLGRACLTAKAFRLLQRMSHSSKALRNVGLYTMKQSYLNHNRMATVKEVDTAMQADMNYWGIQSNSVQAIRRALYAEVKSFFKALEQWKKKPEKFTGRPKFPNYSRSTDKRIIEIYQAPKVDENGYWMIPMSVAFRKKFGSIKIRMPKNIRNKKISYIEIVPKQKGRFFEVHYTYEMHVSQMKQQSTTTSNALSCDLGVDRLVSCVTNTGDTFLIDGKKLKSINQYFNKMIRNLQLKNVENGLSKRVVTNKMAALWHKRERQINGYISQTVGLLFKKVKACNIDTVVVGYNVGWKQKSDMGKKNNQTFVQIPFHKLLAAIENKCVKEGIRFFKQEESYTSKASFLDKDPVPVWSKDDRTHYRFSGKRITRGLYKSKSGKCIHADINGALNTLEKSKVVELDESLKVKTPILLEVQKRKAVASRIA

SEQ ID NO: 5317 - protein, 451 aa, unidentified
MVKKKAVKVLRKQKKRETLRRFTQKQNIGRACLTAKEFRLLQRMSHSSKALRNVGLYTIKQSYLNHNRMATVKEVDTAMQADMNYWGMQSNSVQAIRRALYAEVKSFFKALKKWKENPETFTGRPKFPNYSRSTDKRIIEIYQVPKVDENGYWMIPMSVAFRKKFGSIKIRMPKNIRNKKISYIEIVPKQKGRFFEVHYTYEMHVSQMKKQSTTISNALSCDLGVDRLVSCVTNTGDTFLIDGKKLKSINQYFNKKIRNLQQKNIENGISKRVVTNKIAALWHKREKQINGYISQTVGLLFKKVKAFGIDTIVVGYNAGWKQKSDMGKKNNQKFVQIPFHKLIAAIENKCIKEGIRFFKQEESYTSKASFLDKDPVPVWSKDDRTQYRFSGKRMTRGLYQSKAGTCIHADINGALNTLEKSRVVEWDDNLKVKTPILLEVQKRKAVASRIA

SEQ ID NO: 5318 - protein, 451 aa, unidentified
MAKKKAVKVLRKQKKRETLRRFTQKQNIGRACLTAQEFRLLQRMSHSSKALRNVGLYTMKQSYLNHNKMATVKEVDIAMQADMNYWGIQSNSLQAIRRALFTEVKSFFKALEKWKKNPEKFTGRPKFPNYSHSTDKRIIEIYQVPKVDENGFWMIPMSVAFRKKFGSIKIRMPKNLRNKNISYIEIVPKQKGRFFEVHYTYEMHVSQMKKQPMTTSNALGCDLGVDRLVSCVTNTGDAFLIDGKKLKSINQYFNKTIRNLQQKNVENGLSKRIVTNKIAALWHKRERQIHGYIAQTVGLLFKKVKEFDIDTIVVGYNAGWKQNSHMGKKNNQKFVQIPFHKLIAAIENKCIKEGIRFFKQEESYTSKASFLDKDPVPVWSKDDRTQYRFSGKRITRGLYQSKAGTCIHADINGALNTLQKSQVVELDGNLKVKTPILLEVQKRKAVASRIA

SEQ ID NO: 5319 - protein, 451 aa, unidentified
MAKKKAVKVLRKQKKRETLRRFTQKQNIGRACLTAQEFRLLQRMSHSSKALRNVGLYTMKQSYLNHNKMATVKEVDTAMQADMNYWGIQSNSVQAIRRALFTEVKSFFKALEQWKKNPEKFTGRPKFPNYSHSTDKRIIEIYQVPKVDENGFWMIPMSVAFRKKFGSIKIRMPKNLRNKNISYIEIVPKQKGRFFEVHYTYEMHVSQMKKQPMTTSNALGCDLGVDRLVSCVTNTGDAFLIDGKKLKSINQYFNKMICNLGQKNMDNGISKRIVTNKIAALWHKRERQIHGYIAQTVGLLFKKVKEFDIDTIVVGYNAGWKQNSHMGKKNNQKFVQIPFHKLIAAIENKCIKEGIRFFKQEESYTSKASFLDKDPVPVWSKDDRTQYRFSGKRITRGLYQSKAGTCIHADINGALNTLQKSQVVELDGNLKVKTPILLEVQKRKAVASRIA

SEQ ID NO: 5320 - protein, 451 aa, unidentified
MAKKKAVKVLRKQKKRETLRRFTQKQNIGRACLTAQEFRLLQRMSHSSKALRNVGLYTMKQSYLNYNKMATVKEVDTAMQADMNYWGIQSNSVQAIRRALFTEVKSFFKALEQWKKNPEKFTGRPKFPNYSHSTDKRIIEIYQVPKVDENGFWMIPMSVAFRKKFGSIQIRMPKNLRNKNISYIEIVPKQKGRFFEVHYTYEMHVSQMKKQPMTTSNALGCDLGVDRLVSCVTNTGDAFLIDGKKLKSINQYFNKTIRNLQQKNVENGLSKRIVTNKIAALWHKRERQIHGYIAQTVGLLFKKVKEFDIDTIVVGYNAGWKQNSHMGKKNNQKFVQIPFHKLIAAIENKCIKEGIRFFKQEESYTSKASFLDKDPVPVWSKDDRTQYRFSGKRITRGLYQSKAGTCIHADINGALNTLQKSQVVELDGNLKVKTPILLEVQKRKAVASRIA

SEQ ID NO: 5321 - protein, 451 aa, unidentified
MAKKKAVKVLRKQKKRETLRRFTQKQNIGRACLTAQEFRLLQRMSHSSKALRNVGLYTMKQSYLNYNKMATVREVDTAMQADMNYWGIQSNSVQAIRRALFTEVKSFFKALEQWKKNPEKFTGRPKFPNYSHSTDKRIIEIYQVPKVDENGFWMIPMSVAFRKKFGSIKIRMPKNLRNKNISYIEIVPKQKGRFFEVHYTYEMHVSQMKKQPMTTSNALGCDLGVDRLVSCVTNTGDAFLIDGKKLKSINQYFNKTIRNLQQKNVENGLSKRIVTNKIAALWHKRERQIHGYIAQTVGLLFKKVKEFDIDTIVVGYNAGWKQNSHMGKKNNQKFVQIPFHKLIAAIENKCIKEGIRFFKQEESYTSKASFLDKDPVPVWSKDDRTQYRFSGKRITRGLYQSKAGTCIHADINGALNTLQKSQVVELDGNLKVKTPILLEVQKRKAVASRIA

SEQ ID NO: 5322 - protein, 451 aa, unidentified
MAKKKAVKVLRKQKKRETLRRFTQKQNIGRAYLTAQEFRLLQRMSHSSKALRNVGLYTMKQSYLNHNKMATVKEVDTAMQADMNYWGIQSNSVQAIRRALFTEVKSFFKALEQWKKNPEKFTGRPKFPNYSHSTDKRIIEIYQVPKVDENGFWMIPMSVAFRKKLGSIKIRMPKNLRNKKISYIEIVPKQKGRFFEVHYTYEMHVSQMKQQSTTTSNALSCDLGVDRLVSCVTNTGDAFLIDGKKLKSINQYFNKMICNLQQKNMDNGISKRIVTNKMAALWHKRERQINGYIAQTVGLLFKKVKESDIDTIVVGDNAGWKQNSHMGKKNNQKFVQIPFHKLIAAIENKCIKEGIRFFKQEESYTSKASFLDKDPVPVWSKDNRAQYYFSGKRITRGLYQSKAGTCIHADINGALNTLQKSQVVELDGNLKVKTPILLEVQKRKAVASRIA

SEQ ID NO: 5323 - protein, 413 aa, unidentified
MGKQMTLTERHIIKPTHPIFKRIKDFCHLSKNLYNYANFILREHYFAGFKLPTAYDLINRFVKESQRDYKALPAQSAQQVLMLLSQNWKSYLKALKAYKLKPSSFLARPKIPKFKPKDGVSIGVLTNQQTSFTKGRMTKIKFPKKANLKRLITKINSQTSRLKQVRLIPKTTCFIVEVVYEQTTHKLPQTHGIGIMGIDLGLNNFVTAIDNQSSPFIIKGGGVKSVNQWFNKLKAHYQAKAKTSNKRFWTKRLGKLALWRECKVNDFMHKASAYVVGHCLKKGISTIVIGKNDGWKQELKLGKRTNQNFTSIPYESFIEKLAYKCALVGITLHTTEERFTSKCDHLANEPIQHHEQYLGKRVKRGLFKSSIGKSLNADINGAIGILRKVFPDAVKTLRDSGVVFTPVKISLAF

SEQ ID NO: 5324 - protein, 461 aa, unidentified
MSPLRKTVKTMARKKAVKVLRKQKKREIIQRFTQKQNIGRACLTAKEFRLLQRMSHSSKALRNVGLYTIKQSYLNHNKMATIREVDTAMQADMNYWGIQSNSVQAIRRALFTEVKSFFKALEQWKKKTEQFTGRPKFPNYSRSTDKRIIEIYQVPKVDENGYWMIPMNVAFRKKFGSIKIRMPKNLRNKNISYIEIVPKQKGRFFEVHYTYEMHVSQMKKPPTTTSNALSCDLGVDRLLSCVTNTGDAFLMDGKKLKSINQYFNKMICNLGQKNMDNGISKRIVTNKMAALWHKRERQINGYIAQTVGLLFKKVKEFDIDTIVVGYNAGWKQNSHMGKKNNQKFVQIPFQKLIAAIENKCVKEGIRFFKQEESYTSKASFLDKDPVPVSSKDDKTQYRFSGKRITRGLYQSKAGTCIHADINGALNTLKKSGVVELDGNLKVKTPILLEVQKRKAIALCIA

SEQ ID NO: 5325 - protein, 451 aa, unidentified
MARKKAVKVLRKQKKRETMQRFTQKQNIGRACLTAKEFRLLQRMSHSSKALRNVGLYTIKQSYLNNNKMATVKEVDTAMQTDMNYWGIQSNSVQAIRRALFTEVKSFFKAMEQWKKKPETFTGRPKFPNYSRSTDKRIIEIYQVPKVDNNGYWMIPMNVAFRKKFGSIKIRMPKNLRNKKISYIEIVPKQKGRFFEVHYTYEMHVSQMKKQPTTISKALSCDLGVDRLVSCVTNTGDAFLIDGKKLKSINQYFNKMIRNLQLKNMENGLSKRVVTNKMAALWHKRERQINGYISQTVGLLFEKVKAFNIDTVVVGYNAGWKQKSDMGKKNNQKFVQIPFHKLIAAIENKCVKEGIRFLKQEESYTSKASFLDKDRVPVWSKEDRTHYRFSGKRITRGMYQSKSGKCIHADINGALNTLQKSKVVELDDNLKVKTPILLKVQKRKAVALCIA

SEQ ID NO: 5326 - protein, 451 aa, unidentified
MARKKAVKVLRKQKKREIIQRFTQKQNIGRACLTAKDFRLLQRMSHSSKALRNVGLYTIKQSYLNHNKMATIKEVDTAMQADMNYWGIQSNSVQAIRRALFTEVKSFFKALEQWKKKPEKFTGRPKFPNYSRSTDKRIIEIYQVPKVDDNGYWMIPMNVAFRKKFGSIKIRMPKNVRNKKISYIEIVPKQKGRFFEVHYTYEMHISQMKKPSTTTSNALSCDLGVDRLVSCVTNTGDTFLIDGKKLKSINQYFNKMIRNLQQKNMDNGISNRIVTNKMAALWHKRERQINGYISQTVGLLFKEVKAYNIDTIVIGYNTGWKQKSHIGKKNNQTFAQIPFHKLIAAIENKCVKEGIRFLKQEESYTSKASFLDKDPVPVWSKDDSTHYRFSGKRITRGLYQSKVGTCIHADINGALNTLEKSRVVEWDDNLRVKTPILLEVQKRKAVASRIA

SEQ ID NO: 5327 - protein, 450 aa, unidentified
MARKKAVKVLRKQKKRETIQRFTQKQNIGRACLTAKEFRLLQRMSHSSKALRNVGLYTIKQSYLNDNKMATVKEVDTAMQADMNYWGIQSNSVQAIRRALFTEVKSFFKALEQWKKNPEKFTGRPKFPNYARSTDKRIIEIYQVPKVDENGYWMIPMNVAFRKKFGSIKIRMPKNLRHKKISYIEIVPKQKGRFFEVHYTYEMHVSQMKKPSTTTSNALSCDLGVDRLVSCVTNTGDAFLIDGKKLKSINQYFNKMIRNLQQKNIENGLSKRVVTNKMAALWHKRERQINGYISQTVGLLFKKVKACNIDTVVVGYNAGWKQKSDMGKKNNQTFVQIPFHKLIAAIENKCVKEGIRFLKQEESYTSKASFLDKDRIPVWSKEDRTRYRFSGKRITRGLYQSKAGKCIHADINGALNTLEKSRVVELDDNLKVKTPILLEVQKRKAVVLRA

SEQ ID NO: 5328 - protein, 451 aa, unidentified
MARKKAVKVLRKQKKRENMQRFTQKQNIGRACLTAKEFRLLQRMSHSSKALRNVGLYTIKQSYLNNNKMATVKEVDTAMQTDMNYWGIQSNSVQAIRRTLFTEVKSFFKAMEQWKKKPETFTGRPKFPNYSRSTDKRIIEIYQIPKVDDNGYWLIPMNVEFRKKFGSIKIRMPKNVRNKKISYIEIVPKQKGRFFEVHYTYEMHVSQMKKQPTTTSNALSCDLGVDRLLSCVTNTGDAFLIDGKKLKSINQYFNKMIRNRQQKNIENGLSKRVVTNQMAALWHKRERQINGYISQTVGLLFKKVKAFSIDTVVVGYNAGWKQKSDMGKKNNQKFVQIPLHKLIAAIENKCVKEGIRFLKQEESYTSKASFLDKDPIPVWSKDDRTYHRFNGKRITRGLYQSKSGKCIHADINGALNTLEKSRVVELDENLKVRTPILLEVQKRKAVASRIA

SEQ ID NO: 5329 - protein, 451 aa, unidentified
MAKKKAVKVLRKQKKRETIQRFTQKQNIGRACLTAKEFRLLQRMSHSSKALRNVGLYTIKQSYLNNNKMATVKEVDTAMQTDMNYWGMQSNSVQAIRRALFTEVKSFFKAWEQWKKNPETFTGRPKFPNYSRSTDKRIIEIYQVPKVDDNGYWMIPMNVAFRKKFGSIKIRMPKNLINKQISYIEIVPKQKGRFFEVHYTYEMHVSHMKKQSTTTSNALSCDLGVDRLVSCVTNTGDTFLIDGKKLKSINQYFNKTIRNLQQKNIENGLSKRVVTNKMAALWHKRERQINGYISQTVGLLFKKVKACNIDTVVVGYNAGWKQKSDMGKKNNQTFVQIPFHKLIAAIENKCVKEGIRFLKQEESYTSKASFLDKDPIPVWSKDDRTHYRFSGKRITRGLYQSKAGTCIHADINGALNTLEKSRVVELHENLKVKTPILLEVQKRKAVASRIA

SEQ ID NO: 5330 - protein, 451 aa, unidentified
MARKKAVKVLRKQKKRETMQRFTQKQNIGRACLTAKEFRLLQRMSHSSKALRNVGLYTIKKSYLNHNKMATVKEVDTAMQADLNYSGIQSNSVQAIRRALFTEVKSFFKALEQWKKKPETFTGRPKFPNYSGSTDKRIIEIYQVPKVDDNGYWLIPMNVAFRKKFGSIKIRMPKNVRNKKISYIEIVPKQKGRFFEVHYTYEMHVSQMKKQSTTTSNALSCDLGVDRLLSCVTNTGDAFLIDGKKLKSINQYFNKMIRNLQLKNVENGLSKRVVTNKMAALWHKRERQINGYISQTVGLLFKKVKACNIDTVVVGYNTGWKQKSDMGKKNNQKFVQIPFHKLIAAIENKCVKEGIRFLKQEESYTSKASFLDKDRVPVWSKDDRTHYRFSGKRMTRGLYQSKAGTCIHADINGALNTLEKSRVVELDENLKVKTPILLEVQKRKAVASCIA

SEQ ID NO: 5331 - protein, 451 aa, unidentified
MARKKAVKVLRKQKKREIIQRFTQKQNIGRACLTAKDFRLLQRMSHSSKALRNVGLYTIKQSYLNHNKMATIKEVDTAMQADMNYWGIQSNSVQAIRRALFTEVKSFFKALEQWKKKPEKFTGRPKFPNYSRSTDKRIIEIYQVPKVDDNGYWMIPMNVAFRKKFGSIKIRMPKNVRNKKISYIEIVPKQKGRFFEVHYTYEMHISQMKKPSTTTSNALSCDLGVDRLVSCVTNTGDTFLIDGKKLKSINQYFNKMIRNLQQKNMDNGISNRIVTNKMAALWHKRERQINGYISQTVGLLFKEVKAYNIDTIVIGYNTGWKQKSHIGKKNNQTFAQIPFHKLIAAIENKCVKEGIRFLKQEESYTSKASFLDKDPVPVWSKDDSTHYRFSGKRITRGLYQSKVGTCIHADINGALNTLEKSRVVEWDDNLRVKTPILLEVQKRKAVASCIA

SEQ ID NO: 5332 - protein, 451 aa, unidentified
MARKKAVKVLRKQKKREIIQRFTQKQNIGRACLTAKDFRLLQRMSHSSKALRNVGLYTIKQSYLNHNKMATIKEVDTAMQADMNYWGIQSNSVQAIRRALFTEVKSFFKALEQWKKKPEKFTGRPKFPNYSRSTDKRIIEIYQVPKVDDNGYWMIPMNVAFRKKFGSIKIRMPKNVRNKKISYIEIVPKQKGRFFEVHYTYEMHISQMKKPSTTTSNALSCDLGVDRLVSCVTNTGDTFLIDGKKLKSINQYFNKMIRNLQQKNMDNGISNRIVTNKMAALWHKRERQINGYISQTVGLLFKEVKAYNIDTIVIGDNTGWKQKSHIGKKNNQTFAQIPFHKLIAAIENKCVKEGIRFLKQEESYTSKASFLDKDPVPVWSKDDSTHYRFSGKRITRGLYQSKVGTCIHADINGALNTLEKSRVVEWDDNLRVKTPILLEVQKRKAVASCIA

SEQ ID NO: 5333 - protein, 451 aa, unidentified
MAKKKAVKVLWKQKKRETLRRFTQKQNIGRACLTAQEFRLLQRMSHSSKALRNVGLYTMKQSYLNHNKMATVKEVDTAMQADMNYWGIQSNSVQAIRRALFTEVKSFFKALEQWKENPEKFTGRPKFPNYSHSTDKRIIEIYQVPKVDENGFWMIPMSVAFRKKFGSIKIRMPKNLRNKNISYIEIVPKQKGRFFEVHYTYEMHVSQMKKQPMTTSNALGCDLGVDRLVSCVTNTGDAFLIDGKKLKSINQYFNKTIRNLQQKNVENGLSKRIVTNKIAALWHKRERQIHGYIAQTVGLLFKKVKEFDIDTIVVGYNAGWKQNSHMGKKNNQKFVQIPFHKLIAAIENKCIKEGIRFFKQEESYTSKASFLDKDPVPVWSKDDRTQYRFSGKRITRGLYQSKAGTCIHADINGALNTLQKSQVVELDGNLKVKTPILLEVQKRKAVASRIA

SEQ ID NO: 5334 - protein, 434 aa, unidentified
MIYLYGCQQILIHTDKILKAILEFICSESNKLSNGAIYYARQVWFKAKRYITKFELDSEMKSNRHFQTLYSQAAQQLCRSVYESFASFKQLNVLYKRGELVDKPKPPKYRKNGFNLVSYPKQALKLKDGQIRIPLGSQVKSWFKLDSFTLPMPSNLKFEDIKELRILPRNRCFYAEFIYKSNTVNSDVDKSRVLGIDHGLNNWLTCVSNVGTSFIVDGRHVKSLNRWYNKQVAIIKESKPQGFWSNKLAAITEKRNRQIRDAINKVARLVISHCLNNRIGRVVFGWGQGIKQEINLGQKRNQQFVQIPTARLKQRVEQLCQQYGIEFVETEEANTSAASFVDGDTLPKHGEKPDNWKSSGRRVKRGLFRTALNWYINADCNGAANIIRKVSTTLGLDLSGVSRGALTHPTRQYIWVTAKKKAIFADLSRCVASF

SEQ ID NO: 5335 - protein, 416 aa, unidentified
MQLVERHIITKIHSFWSSLDQVCFASKNLYNKANYNIRQSLIFCGEFSSYNLLDKVLKSTPEYRALPAKVAQQTLRNLEQNWSSFFAGIKEYKSHPEKFLGKPKLPKYKDKNGRHLVIYTAQAVSKKSLKQGLIKLSGLDFYFPTKIRGEKLHQVRVIPKNNYYIIEVIYEKEEVKPKDKTEKIAAIDLGINNLIALTSNQQGFTPILINGRILKSINQFYNLKKAKLQKQLPLGQYWSNRLSLLTRKREEKINDYFHKVSSYLVNLLLESEIDTLVIGKNKNWKQKVELGKRNNQNFTSIPHNKLIEKIKYKCQLVGITVIEREESYTSVASFLDLDEMPTYGVVREEEKVKFSGRRIKRGLYRSGSGKLINADVNASYNILRKAFPKAFVEGIERCVVHPRLVTSTKQKMKGST

SEQ ID NO: 5336 - protein, 416 aa, unidentified
MQLVERHIITKTHSFWSSLDQVCFASKNLYNKANYNIRQSLIFCGEFSSYNLLDKVLKSTPEYRALPAKVAQQTLRNLEQNWSSFFAGIKEYKSHPEKFLGKPKLPKYKDKNGRHLVIYTAQAVSKKSLKQGSIKLSGLDFSFPSKIRGEKLHQVRVVPKNNYYIIEVIYEKEEVKPKDKTEKIAAIDLGINNLIALTSNQQGFTPILINGRILKSINQFYNLKKAKLQKQLPLGQYWSNRLSLLTRKREEKINDYFHKVSSYLVNLLLESEIDTLVIGKNKNWKQKVELGKRNNQNFTSIPHNKLIEKIKYKCQLVGITVIEREESYTSVASFLDLDEMPTYGVVREEEKVKFSGRRIKRGLYRSGSGKLINADVNASYNILRKAFPKAFVEGIERCVVHPRLVTSTKQKMKVST

SEQ ID NO: 5337 - protein, 434 aa, unidentified
MIYLYGCQQILIHTDKILKAILEFICSESNKLSNCAIYYARQVWFKAKRYITKFELDSEMKSNRHFQTLYSQAAQQLCRSVYESFASFKQLNVLYKRGELVDKPKPPKYRKNGFNLVSYPKQALKLKDGQIRIPLGSQVKSWFKLDSFTLPMPSNLKFEDIKELRILPRNRCFYAEFIYKSNTVNSDVDKSRVLGIDHGLNNWLTCVSNVGTSFIVDGRHVKSLNRWYNKQVAIIKESKPQGFWSNKLAAITEKRNRQIRDAINKVARLVISHCLNNRIGRVVFGWGQGIKQEINLGQKRNQQFVQIPTARLKQRVEQLCQQYGIEFVETEEANTSAASFVDGDTLPKHGEKPDNWKSSGRRVKRGLFRTALNWYINADCNGAANIIRKVSTTLGLDLSGVSRGALTHPTRQYIWVTAKKKAIFADLSRCVASF

SEQ ID NO: 5338 - protein, 452 aa, unidentified
MAFLVHQGHAANSLINSAHYEIRQRHYAECPRVEFFDKDDFYRTSLKIKTVKDAGYATLCALMKDNPHYQQLGGQCAQQTLKSVAEQYVSYNGLLSSWAKGEVSKPSMPTYRKSGGLSGFTYPVQAVTLDIETGMCRIPISRELNAFVKDELGLKEIWINGAIGFNPSQLVEVRILPRNNNWYAEYVYQSGNDGAICSLDLDCKSAIGIDPGTARNWLTCVTTEGKSFIIDVHKIKASNQWYNKQVATIKEGKPQGFWNDELARITEKRNCQMRDAVNKAARFIINYCLNYKIGNVVFGWNTRHKDGSDMGKRNNQNHVQIPTAKLKERIQQLCEENGIQFHETEESYTSKSSFLDNDVLPKYGEKPKEWKPSGIRNGRIYKTANGAIVNADAQAAANILKKVAIQLGFSLVKIVREVLTLPKRYDLFRNLKNSYRKRSCYGRLLVPVATTA

SEQ ID NO: 5339 - protein, 416 aa, unidentified
MRLAFKFKPKFNNKQLEIIKELSWHTTKLYNIVNYEVRNNEDVKPIYTQLEKRFKSNWHNDFLHSHNRQQALKQLAQDWKSYFASIKDYKKHPSKYKGQPRPPKFKNMDRNPNEIIFTNLATRVRDNHLLLSLAKTIKSEFDVKSLKFELPVAVQSIVNLETIQQVRIKQDKLSKEWYLLIIHKVAEVKENTNSNIMSIDLGLDNLATLTFKDNSESYIINGKTIKSKNLYFNKEIAKLQRIRMKQLGTSKVKDTKQIRNLRLKRRNYVKDYLHKASRKIIDLAIENKVSNIIIGDLKNIKQGNSLKSFVQIPIQRLVELIKYKAKLVGIKVVLINESYTSGCSSIDLEKLNKANYDKSRRIARGLFKTGNKLINADINGSLNIMRKYLKNKCIPKMLKQIRDNGLVASPKRIRIS

SEQ ID NO: 5340 - protein, 283 aa, unidentified
MAKKKAVKVLRKQKKRETLRRFTQKQNIGRACLTAQEFRLLQRMSHSSKALRNVGLYTMKQSYLNYNKMATVKEVDTAMQADMNYWGIQSNSVQAIRRALFTEVKSFFKALEQWKKNPEKFTGRPKFPNYSHSTDKRIIEIYQVPKVDENGFWMIPMSVAFRKKFGSIKIRMPKNLRNKNISYIEIVPKQKGRFFEVHYTYEMHVSQMKKQPMTTSNALGCDLGVDRLVSCVTNTGDAFLIDGKKLKSINQYFNKTIRNLQQKKCGKWTFKTNCNEQNRCTLA

SEQ ID NO: 5341 - protein, 413 aa, unidentified
MKLSFKFRPNINPTQLEIIEELSYHTTKLYNIISYDLRKNGFKNYYEIEKLYKNNWHCDFLHSHTRQQMFKILEQNWKSYFASIKDFGVNPSKYKGLPRPPKFKNTERNKNEIIFTNLAIRFQDGILKLSLSKSIQKLFKVDSLNFEVSNKLQSLINWNRLQQARFNYDKVQKCWYLIVIYNKDEAENSNDNVMSIDIGLDNLATITFKNGINQYVYCGKKLKSVNSYANKRIAYLQAIEMKKYDSDKFKNTKEINRLRKYRNNYINDYLHKVSKNIIDKAIKNNVGKIVIGKLKDIKQDMNYNKSFVQIPIQRLVELITYKAKLKGIEIKLQEESYTSGCSAIDLEPVTKKYYNKSRRITRGLFKSGYGILNADINGSLNILRKSEKCIPDLVNAMRDKGNWTHPQRIRIAC

SEQ ID NO: 5342 - protein, 413 aa, unidentified
MGKQMTLTERHIIRPTHPIFKRIKNFCHLSKNLYNYANFILREHYFAGFKLPTAYDLINRFVKESQRDYKALPAQSAQQVLMLLSQNWKSYLKALKAYKLKPSSFLARPKIPKFKPKDGVSIGVLTNQQTSFTKGRMTKIKFPKKANLKRLITKINPQTSRLKQVRLIPKTTCFIVEVVYEQTMHKLPQTHGIGIMGIDLGLNNFVTAIDNQSSPFIIKGGGVKSVNQWFNKLKAHYQAKAKTSSKCFWTKRLGKLALWRECKVNDFMHKASAYVVGHCLKKGISTIVIGKNDGWKQELKLGKRTNQSFTNIPYESFIEKLAYKCALVGITLHTTEESFTSKCDHLANEPMQHHEQYLGKRVKRGLFKSSIGKSLNADINGAIGILRKVFPDAVKTLRDSGVVFTPVKISLAF

SEQ ID NO: 5343 - protein, 467 aa, unidentified
MYKTIQVRLNVSEEVMAFLVHQGHAANSLINSAHYEIRQRHYAECPRVEFFDKDDFYRTSLKIKTVKDAGYATLCALMKDNPHYQQLGGQCAQQTLKSVAEQYVSYNGLLSSWAKGEVSKPSMPTYRKSGGLSGFTYPVQAVTLDIETGMCRIPISRELNAFVKDELGLKEIWINGAIGFNPSQLVEVRILPRNNNWYAEYVYQSGNDGAICSLDLDCKSAIGIDPGTARNWLTCVTTEGKSFIIDVHKIKASNQWYNKQVATIKEGKPQGFWNDELARITEKRNCQMRDAVNKAARFIINYCLNYKIGNVVFGWNTRHKDGSDMGKRNNQNHVQIPTAKLKERIQQLCEENGIQFHETEESYTSKSSFLDNDVLPKYGEKPKEWKPSGIRNGRIYKTANGAIVNADAQAAANILKKVAIQLGFSLVKIVREVLTLPKRYDLFRNLKNSYRKRSCYGRLLVPVATTA

SEQ ID NO: 5344 - protein, 412 aa, unidentified
MKLVERHLVTKNHPLWSDLDQKAFLSKNLFNLANYHYRQHFFQHYQKLNFNQLYHLLSQTPDYKALPTKVSKQIIRRLDSAWTSYFQAVKVWQKHPENFLGQPKIPRYKHKTKGRNILPYPHESISKKALKKGICHLSMSEIKIPTSQRSIIEARIVPKSSCYVIEIVYEKAEETTNYQEIAGIDLGVNNLMAVTTNQIGVRPLLIKGRPLKAINTFYNKQRSSLQSQLKLKHNQTQSQRLKNLTHKRNCRVENYLHTASKRVIDWCTQHQIGILVIGHNATWKQSINLGKRNNQQFVNIPHYRLIEMLTYKAQLKGIRVVITEESYTSVASAVDGDALPKYGEKRPRFQGHRIARGLYKTAKGRLLNADVNGSFNITRKVIPDVVDQGIKGLPFNPVVLDPLRMTELSAFK

SEQ ID NO: 5345 - protein, 451 aa, unidentified
MARKKAVKVLRKQKKRETMQRFTQKQNIGRACLTAKEFRLLQRMSHSSKALRNVGLYTMKQSYLNHNKMATVKEVDTAMQADMNYSGIQSNSVQAIRRALYAEVKSFFKALEQWKRKQETFTGRPKFPNYSRSTDKRIIEIYQVPKVDNNGYWMIPMNVAFRKKFGSIKIRMPKNLRNKKISYIEIVPKQKGRFFEVHYTYEMHVSQMKKPSTTTSSALSCDLGVDRLVSCATNTGDAFLIDGKKLKSINQYFNKMMRNLQLKNIENGLSKRVVTNRMAALWHKRERQINGYISQTVGLLFKKVKACNIDTVVVGYNAGWKQKSDMGKKNNQTFVQIPFHKLIAAIENKCIKEGIRFLKQEESYTSKASFLNKDPVPVWSKEDRTHYLFSGKRITRGLYQSKAGTCIHADINGALNTLQKSKVVELDDNLKVKTPILLEVQKRKAVASRIA

SEQ ID NO: 5346 - protein, 451 aa, unidentified
MARKKAVKVLRKQKKRENIQRFTQKQNIGRACLTAKEFRLLQRMSHSSKALRNVGLYTIKQSYLNNNKMATVKEVDTAMQADMNYWGIQSNSVQAIRRSLFTEVKSFFKGLEQWKKKPETFAGRPKFPNYSGSTDKRIIEIYQVPKVDDNGYWMIPMNVAFRKKFGSIKIRMPKNVRNKKISYIEIVPKQKGRFFEVHYTYEMHVSQMKKPSTTTSNALSCDLGVDRLLSCVTNTGDAFLIDGKKLKSINQYFNKMIRNLQLKNVENGLSKRVVTNKMAALWHKRERQINGYISQTVGLLFKKVKACNIDMVVVGYNTGWKQKSDMGKKNNQKFVQIPFHKLIAAIENKCIKEGIRFLKQEESYTSKASFLDKDKIPVWSKEDRTHYRFSGKRITRGLYQSKSGTCIHADINGALNTLEKSKIVQLDDNLKVKTPILLKVQKRRAFASRIA

SEQ ID NO: 5347 - protein, 451 aa, unidentified
MVKKKAVKVLRKQKKRENIQRFTQKQNIGRACLTAKEFRLLQRMSHSSKALRNVGLYTIKQSYLNHNKMATVKEVDNAMQADMNYWGIQSNSVQAIRRALFTEVKSFFKAWEQWKKNPETFTGRPKFPNYSRSTDKRIIEIYQVPKVDDNGYWMIPMNVAFRKKFGSIKIRMPKNLRNKKISYIEIVPKQKGRFFEVHYTYEMHVSQMKQQSTTTSNALSCDLGVDRLLSCVTNTGDTFLIDGKKLKSINQYFNKKIRNLQQKNIENGISKRVVTNRMAALWHKRERQVNGYISQTVGLLFKKVKAFDIDTIVVGYNTGWKQKSDMGKKNNQKFVQIPFHKLIAAIENKCIKEGIRFLKQEESYTSKASFLDKDPIPVWSKDDRAHYRFSGRRITRGLYQSKAGTCIHADINGALNTLEKSRVVELDDNLKGKTPILLEVQKRKAVASRIA

SEQ ID NO: 5348 - protein, 451 aa, unidentified
MAKKKAVKVLRKQKKRETLRRFTQKQNIGRACLTAQEFRLLQRMSHSSKALRNVGLYTMKQSYLNYNKMATVKEVDTAMQADMNYWGIQSNSVQAIRRALFTEVKSFFKALEQWKKNPEKFTGRPKFPNYSHSTDKRIIEIYQVPKVDENGFWMIPMSVAFRKKFGSIKIRMPKNLRNKNISYIEIVPKQKGRFFEVHYTYEMHVSQMKKQPMTTSNALGCDLGVDRLVSCVTNTGDAFLIDGKKLKSINQYFNKTIRNLQQKNVENGLSKRIVTNKIAALWHKRERQIHGYIAQTVGLLFKKVKEFDIDTIVVGYNAGWKQNSHMGKKNNQKFVQIPFHKLIAAIENKCIKEGIRFFKQEESYTSKASFLDKDPVPVWSKDDGTQYRFSGKRITRGLYQSKAGTCIHADINGALNTLQKSQVVELDGNLKVKTPILLEVQKRKAVASRIA

SEQ ID NO: 5349 - protein, 345 aa, unidentified
MVKTMAKKKAVKVLRKQKKRETLRRFTQKQNIGRACLTAQEFRLLQRMSHSSKALRNVGLYTMKQSYLNYNKMATVKEVDTAMQADMNYWGIQSNSVQAIRRALFTEVKSFFKALEQWKKNPEKFTGRPKFPNYSHSTDKRIIEIYQVPKVDENGFWMIPMSVAFRKKFGSIKIRMPKNLRNKNISYIEIVPKQKGRFFEVHYTYEMHVSQMKKQPMTTSNALGCDLGVDRLVSCVTNTGDAFLIDGKKLKSINQYFNKTIRNLQQKNVENGLSKRIVTNKIAALWHKRERQIHGYIAQTVGLLFKKVKEFDIDTIVVGCNAGWKQNSHMGKKNNQKLFKSRSIN

SEQ ID NO: 5350 - protein, 451 aa, unidentified
MAKKKAVKVLRKLKKRENLQRFTQKQNIGRACFTAKEYRLLQRMSHSSKALRNVGLYTIKQSYLKHNKMATVKEVDTAMQADMNYSGIQSNSVQAIRRALFTEVKSFFKALEQWKKKPETFAGRPRFPNYSGPTDKRIIEIYQVPKVDDNGYWMIPMNVAFRKKFGSIKIRMPKNVRNKKISYIEIIPKQKGRFFEVHYTYEMHVSQMKKQSTTTSNALSCDLGVDRLLSCVTNTGDTFLIDGKKLKSINQYFNKMIRNLQQKNMDNGISKRIVTNKMAALWHKRERQINGYISQTVGLLFKKVKACNIDTVVVGYNAGWKQKSDMGKKNNQKFVQIPFHKLIAAIENKCVKEGIRFLKQEESYTSKASFLDKDRVPVWSKDDRTHYRFSGKRITRGLYQSKTGTCIHADINGALNTLKKSRVVQLDENLKVKTPILLEVQKRKAVASCIA

SEQ ID NO: 5351 - protein, 419 aa, unidentified
MYLTQSNQIRGLSKEQFQQLREMCHYAKNLYNVGLYNIRQHYFTEKTFLNYEANYHVSKTNENYKLLQAGVSQQILKVVDRSFKSFFNLIKKAKKDEYRFQDIRMPKYLKKDGLFSLIFSTNAINIKDGFFRVAVSNAYKKANPNYKEILIPFPSRLEGKKIKEVRIVPRNNGKFFHIQYVYEQPSEKAELDFNKALAIDIGLNNLASCVDSDGASFLVDGKKLKSINRLYNKEKARLQSVAMKQGLKYTKRMDSLTLKRNNQVNDYIKKTARFIINYCLENQIGNLVVGYNKDFKRNINIGKKNNQQFTQIPIGNLREQLSNLCERYGIFYKKQEESYTSKASFFDNDEMPRWNPADEKEYPFSGKRINRGLYRTSTGYEFNADINGALNILRKSNLLDTRILQARGCLARPSRIRVA

SEQ ID NO: 5352 - protein, 428 aa, unidentified
MYLTQKNHIRCDRRTYKILRILTRLSKNLYNFTLYTVRQYYFNNGKYLPYEQAYHLVKHNENYQLLPSQVAQQTMKVVDRNMRSFFHVLNERKKGNFNRPVSMPGYLPKDGYFVCIFQKDMFKVIGNKIRLSLGRNFAKEFGIRYLEFKLPSTVVGKKIKEVRILPRYKALWFEIEYVYDVEPERVDLDYGQYLAIDLGLGNFATCISTGGTPFIIEGRGLKSFNRWWNRENAKLQSIYDKQGIKMGRKIAWLLRKRKNVINNFMNQAVSHIVKYCLSNRIGNVVIGELKDIKQNINLGRINNQNFQYIPYGLFKQKLKTKCEYYGINYIEVNEAYTSQTCSVCGDINRNNRKHRGLYVCGECGSVLNADVNGALNILKKVAPESVRIGSSGGVNPPVRIRVASFGNQTPHEALSVRARQFTVTNRKG

SEQ ID NO: 5353 - protein, 417 aa, unidentified
MFGCQQVLIKSNKDTEAILEYLCSESNDLYNCAVYYARQIWFKTGKIVSGFDLTAEMKTNRHLNAGYASSMQQTCINVGEAFKSFKQLLAKSKKGELEQKPKPPKYRKSGGLFTVTYPKRWLKLVDNKIRFPLGNQVKAWFGISEFFLSMPSNLDWKVVKEIRILPRNGAFYAEFVYSMQAKPYQLDPSKALGLDPGLNNWLTCVSNIGTSFIVDGKELKALNQWYNKQVSTMKDAKPQGFWSRTLAQITEKRNRQMRDAVNKAARIVVNHCLENGIGLIVFGWNKGQKDSANMGAKTNQKFVSVPTAKLKDRIEQLCQQHGILFEETEESYTSKASFLDNDELPKYGEKPNEWKSSGKRVKRGLFRTATFGYINADCNGAANILRKLNVKGKFNLDLSGLTRGVLTAPIRVRLWST

SEQ ID NO: 5354 - protein, 451 aa, unidentified
MVKKKAVKVLRKQKKRETLRRFTQKQNIGRACLTAKEFRLLQRMSHSSKALRNVGLYTIKQSYLNHNRMATVKEVDTAMQADMNYRGMQSNSVQAIRRALYAEVKSFFKALKKWKENPETFTGRPKFPNYSRSTDKRIIEIYQVPKVDENGYWMIPMSVAFRKKFGSIKIRMPKNIRNKKISYIEIVPKQKGRFFEVHYTYEMHVSQMKKQSTTISNALSCDLGVDRLVSCVTNTGDTFLIDGKKLKSINQYFNKKIRNLQQKNIENGISKRVVTNKIAALWHKRERQINGYISQTVGLLFKKVKAFGIDTIVVGYNAGWKQKSDMGKKNNQKFVQIPFHKLIAAIENKCIKEGIRFFKQEESYTSKASFLDKDPVPVWSKDDRTQYRFSGKRMTRGLYQSKAGTCIHADINGALNTLEKSRVVEWDDNLKVKTPILLEVQKRKAVASRIA

SEQ ID NO: 5355 - protein, 451 aa, unidentified
MARKKAVKVLRKQNKRETMQRFTQKQNIGRACLTAKEFRLLKRMSHSSKALRNVGLYTIKQSYLNHNRVATVKEVDNAMQADMNYSGVQSNSVQAIRRALFTEVKSFFKALEQWKKHPDKFTGRPKFPNYSRSTDKRIIEIYQVPKVDENGYWIIPMNVAFRKKFGSIRIRMPKNLRNKNISYIEIVPKQKGRFFEVHYTYEMHVSQMKKQPMTTSNALGCDLGVDRLVSCVTNTGDAFLIDGKKLKSINQYFNKTIRNLQQKNVENGLSKRIVTNKIAALWHKRERQIHGYIAQTVGLLFKKVKEFDIDTIVVGYNAGWKQKSHMGKKNNQTFVQIPFEKLIAAIENKCIKEGIRFFKQEESYTSKASFLDKDPVPVWSKDDRTQYRFSGKRITRGLYQSKAGTCIHADMNGALNTLKKSGVVELDDNLKVKTPILLEVQKRKAVASRIA

SEQ ID NO: 5356 - protein, 451 aa, unidentified
MARKKAVKVLRKQKKRENMQRFTQKQNIGRACLTAKEFRLLQRMSHSSKALRNVGLYTMKQSYLNDNKMATVKEVDTAMQADTNYWGIQSNSVQAIRRALYAEVKSFFKALEQWKKNPEKFTGRPKFPNYSRFTDKRIIEIYQVPKVDENGYWIIPMNVAFRKKFGSIQIRMPKNLRNKNISYIEIVPKQKGRFFEVHYTYEMHVSQMKKPPATTSNALSCDLGVDRLLSCVTNTGDAFLIDGKKLKSINQYFNKMICNLGQKNMDNGISKRIVTNKMAALWHKRERQINGYIAQTVGLLFKKVKEFDIDTIVIGYNAGWKQKSHMGKKNNQKFVQIPFQKLIAAIENKCVKEGIRFFKQEESYTSKASFLDKDSVPVWSKDDKTQYRFSGKRITRGLYQSKAGTCIHADINGALNTLKKSKIVELDENLKVKTPILLEVQKRKAVTSRIA

SEQ ID NO: 5357 - protein, 451 aa, unidentified
MTKKRAVKVLRKQKKRENMQRFTQKQNIGRACLTAKEFRLLQRMSHSSKALRNVGLYTIKQSYLNNNKMATVKEVDTAMQTDMNYWGIQSNSVQAIRRALFTEVKSFFKAMEQWKKKPETFTGRPKFPNYSRSTDKRIIEIYQVPKVDNNGYWMIPMNVAFRKKFGSIKIRMPKNLRNKKISYIEIVPKQKGRFFEVHYTYEMHVSQMKKQPTTISKALSCDLGVDRLLSCVTNTGDAFLIDGKKLKSINQYFNKMIRNLQLKNMENGLSKRVVTNKMAALWHKRERQINGYISQTVGLLFEKVKAFNIDTVVVGYNAGWKQKSDMGKKNNQKFVQIPFHKLIAAIENKCIKEGIRFLKQEESYTSKASFLDKDRVPVWDKDDRTHYRFSGKRITRGLYQSKAGKCIHADINGALNTLEKSRVVELDDNLKVKTPILLEVQKRKAVASCIA

SEQ ID NO: 5358 - protein, 451 aa, unidentified
MAKKKAVKVLRKQKKRETLRRFTQKQNIGRACLTAQEFRLLQRMSHSSKALRNVGLYTMKQSYLNYNKMATVKEVDTAMQADMNYWGIQSNSVQAIRRALFTEVKSFFKALEQWKKNPEKFTGRPKFPNYSHSTDKRIIEIYQVPKVDENGFWMIPMSVAFRKKFGSIKIRMPKNLRNKNISYIEIVPKQKGRFFEVHYTYEMHVSQMKKQPMTTSNALGCDLGVDRLVSCVTNTGDAFLIDGKKLKSINQYFNKTIRNLQQKNVENGLSKRIVTNKIAALWHKRERQIYGYIAQTVGLLFKKVKEFDIDTIVVGYNAGWKQNSHMGKKNNQKFVQIPFHKLIAAIENKCIKEGIRFFKQEESYTSKASFLDKDPVPVWSKDDRTQYRFSGKRITRGLYQSKAGTCIHADINGALNTLQKSQVVELDGNLKVKTPILLEVQKRKAVASRIA

SEQ ID NO: 5359 - protein, 451 aa, unidentified
MARKKAVKVLRKQKKRETMQRFTQKQNIGRACLTAKEFRLLQRMSHSSKALRNVGLYTMKQSYLNHNKMATVKEMDTAMQADMNYSGIQSNSVQAIRRALYAEVKSFFKALEQWKRKQETFTGRPKFPNYSRSTDKRIIEIYQVPKVDNNGYWMIPMNVAFRKKFGSIKIRMPKNLRNKKISYIEIVPKQKGRFFEVHYTYEMHVSQMKKPSTTTSSALSCDLGVDRLVSCATNTGDAFLIDGKKLKSINQYFNKMMRNLQLKNIENGLSKRVVTNRMAALWHKRERQINGYISQTVGLLFKKVKACNIDTVVVGYNAGWKQKSDMGKKNNQTFVQIPFHKLIAAIENKCIKEGIRFLKQEESYTSKASFLNKDPVPVWSKEDRTHYLFSGKRITRGLYQSKAGTCIHADINGALNTLQKSKVVELDDNLKVKTPILLEVQKRKAVASRIA

SEQ ID NO: 5360 - protein, 414 aa, unidentified
MKLSFKYYPKLNQQQFNIMEELSYHTTKLYNIANYNCREDTVKSYVEMNKIYNNNYHKQFLHSHNYQQCLKILEKNWKSYFASIKDYKKNPNKYLGQPRQPKFKNTNNKKNEIIFTQHAIRLQDNILKLSLSKEIKNKFQVQSLNFDLSKIKIPVDLITIKQIKIQWNNSKKQWNLNIIWAKEEVNIAKDYYNIMSIDLGLNNLATITFEDNIHSYIIDGKYVKSKNSYYYKEIARLTSIVMKQYKNSKYFKRTQQLIKLQTKRNNFIKDYIHKSSKKIIDLAIINRCHTIVIGDFKGIKQENTAKSFVQTPQQQLVEKIKYKAKLLGIKVVIQNESYTSGCSALDLEEIGKDRYNNNRRIYRGLFKSNKGILINADVNGSYNIMRKYLKCTPKSLIKIMDNGFLDNPIRLRVA

SEQ ID NO: 5361 - protein, 451 aa, unidentified
MARKKAVKVLRKQKKRENMQRFTQKQNIGRACLTAKEFRLLQRMSHSSKALRNVGLYTIKQSYLNNNKMATVKEVDTAMQADMNYSGIQSNSVQAIRRAVFTEVKSFFKAWEQWKKKPETFTGRPKFPNYSRSTDKRIIEIYQVPKVDDNGYWMIPMNAAFRKKFGSIKIRMPKNLRNKKISYIEIVPKQKGRFFEVHYTYEXHVSQMKKPLTTTSNALSCDLGVDRLLSCVTNTGDTFLIDGKKLKSINQYFNKIIRDLQLKNMENGLSKRVVTNQMAALWHKRERQINGYISQTVGLLFKKVKACSVDTVVVGYNAGWKQKSDMGKKNNQKFVQIPFHKLIAAIENKCVKEGIRFFKQEESYTSKASFLDKDPVPVWSKDDRTYHYFSGKRITRGLYQSKAGTCIHADINGALNTLEKSRVVKLEDNLKVKTPILLEVQKRKAVASRIA

SEQ ID NO: 5362 - protein, 451 aa, unidentified
MVKKKAVKVLRKQKKRENIQRFTQKQNIGRACLTAKEFRLLQRMSHSSKALRNVGLYTIKQSYLNHNKMATVKEVDNAMQADMNYWGIQSNSVQAICRALFTEVKSFFKAWEQWKKNPETFTGRPKFPNYSRSTDKRIIEIYQVPKVDDNGYWMIPMNVAFRKKFGSIKIRMPKNLRNKKISYIEIVPKQKGRFFEVHYTYEMHVSQMKQQSTTTSNALSCDLGVDRLLSCVTNTGDAFLIDGKKLKSINQYFNKMIGNLKQKNVENGLSKRVVTNKMATLWHKRERQVKGYISQTVGLLFKKVKAFDIDTIVVGYNTGWKQKSDMGKKNNQKFVQIPFHKLIAAIENKCIKEGIRFLKQEESYTSKASFLDKDPIPVWSKDDRAHYRFSGRRITRGLYQSKAGTCIHADINGALNTLEKSRVVELDDNLKVKTPILLEVQKRKAVASRIA

SEQ ID NO: 5363 - protein, 451 aa, unidentified
MARKKAVKVLRKQKKRETMQRFTQKQNIGRACLTAKEFRLLQRMSHSSKALRNVGLYTIKQSYLNNNKMATVKEVDTAMQTDMNYWGIQSNSVQAIRRALFTEVKSFFKALEQWKKNPETFTGRPKFPNYSGSTDKRIIEIYQVPKVDDNGYWLIPMNVAFRKKFGSIKIRMPKNVRNKKISYIEIVPKQKGRFFEVHYTYEMHVSQMKKQSTTTSNALSCDLGVDRLLSCVTNTGDAFLIDGKKLKSINQYFNKMIRNLQLKNVENGLSKRVVTNKMAALWHKRERQINGYISQTVGLLFKKVKACNIDTVVVGYNTGWKQKSDMGKKNNQKFVQIPFHKLIAAIENKCIKEGIRFLKQEESYTSKASFLDKDPVPVWSKDDKTYYRFSGKRITRGLYQSKAGTCIHADINGALNTLQKSRVVALDENLKVKTPILLEVQKRKAVASCIA

SEQ ID NO: 5364 - protein, 418 aa, unidentified
MYLTQANVIRGLSKEEYSILREMCQYSNNLYNAALYNIRQYYFQEKKFLKYEENYHVCKENENYGLLQAGVSQQTLKVADRSFKSFFNLIKKAKSGEYRFKDIKMPRYREKGGMFNLILSTNAININNGFLTVPMSREFSKLHGGKQVKIPFPKRLEGKTIKEIRICPIYNGIYFKIQYCYLQVEEPQDVSTDNVLAIDIGLENLATCVTNTGTAFIMDGRKLKSINQYWNKQKAYYQSIADKQGQKKTHRLYVLTRKRNHRTQDYIRKVARYIINYCIEHRIGTIVCGYNGNFKRSMNLGKITNQQFTQISFGSLRETLKGLCERYGMKYIEQEESYTSKASCLDLDEIPVYKPEQPYMGAFSGKRVHRGLYQFADGRMANADVNGAANILRKSKQNFDYEELCRGLLDSPLRIRIS

SEQ ID NO: 5365 - protein, 451 aa, unidentified
MARKKAVKVLRKQKKRETMQRFTQKQNIGRACLTAKEFRLLQRMSHSSKALRNVGLYTIKQSYLNHNKVATVKEVDTAMQADMNYWGVQSNSVQAIRRALFTEVKSFFKALEQWKKKPETFTGRPKFPNYSRSTDKRVIEIYQVPKVDDNGYWMIPMSIAFRKKFGSIKIRMPKNLRNKKISYIEIVPKQKGRFFEVHYTYEMHVSQMKKPPTTTSNALSCDLGVDRLVSCVTNTGDAFLIDGKKLKSINQYFNKMIGNLGRKNMDNGISKRIVTNKMAALWHKRERQINGYIAQTVGLLFKKVKEFDIDTIVVGYNAGWKQNSHMGKKNNQKFVQIPFHKLIAAIENKCIKEGIRFFKQEESYTSKASFLDKDKVPVWPKDDKTHYRFSGKRITRGLYQSKAGTCIHADINGALNTLEKSKVVELDENFKVKTPILLEVQKRKAVASRIA

SEQ ID NO: 5366 - protein, 413 aa, unidentified
MKLSFKFRPNINPTQLEIIEELSYHTTKLYNIISYDLRKNGFKNYYEIEKLYKNNWHCDFLHSHTRQQMFKILEQNWKSYFASIKDFGVNPSKYKGLPRPPKFKNTERNKNEIIFTNLAIRFQDGILKLSLSKSIQKLFKVDSINFEVSNKLQSLINWNRLQQARFNYDKVQKCWYLIVIYNKDEAENSSENVMSIDIGLDNLATITFKNGINQYVYCGKKLKSVNSYTNKRIAYLQAIEMKKYGSYKFKNTKEINRLRKYRNNYINDYLHKVSKNIIDKAIKNNVGKIVIGKLKDIKQDMNYNKSFVQIPIQRLVELITYKAKLKGIEIKLQEESYTSGCSAIDLEPVTKKYYNKSRRITRGLFKSGYGILNADINGSLNILRKFEKCIPDLVNAMRDKGNWTHPQRIRIAC

SEQ ID NO: 5367 - protein, 481 aa, unidentified
MKNIFLFHFFLNINLSKIILILPLRKAVKTMARKKAVKVLRKQKKRENMQRFTQKQNIGRACLTAKEFRLLQRMSHSSKALRNVGLYTIKQSYLNDNKMATIKEVDTAMQADTNYWGMQSNSVQAIRRTLFTEVKSFFKALEQWKKNPEKFTGRPKFPNYSRSTDKRIVEIYQVPKVDDNGYWMIPMNVAFRKKFGSIKIRMPKNLKNKKISYIEIVPKQKGRFFEVHYTYEMHVSQMKKPSTTTSNALSCDLGVDRLVSCVTNTGDAFLIDGKKLKSINQYFNKMICNLGQKNMDNGISKRIVTNKMAALWHKRERQINGYIAQTVGLLFKKVKEFDIDTIVIGYNAGWKQNSHMGKKNNQKFVQIPFQKLMAAIENKCIKEGIRFFKQEESYTSKASFIDKDPVPVWSKDDKTQYRFSGKRITRGLYQSKAGTCIHADINGALNTLQKSRVVQLDDNLKVKTPILLEVQKRKAVASRIA

SEQ ID NO: 5368 - protein, 451 aa, unidentified
MARKKAVKVLRKQKKRENMQRFTQKQNIGRACLTAKEFRLLQRMSHSSKALRNVGLYTIKQSYLNDNKMATIKEVDTAMQADTNYWGMQSNSVQAIRRTLFTEVKSFFKALEQWKKNPEKFTGRPKFPNYSRSTDKRIVEIYQVPKVDDNGYWMIPMNVAFRKKFGSIKIRMPKNLKNKKISYIEIVPKQKGRFFEVHYTYEMHVSQMKKPSTTTSNALSCDLGVDRLVSCVTNTGDAFLIDGKKLKSINQYFNKMICNLGQKNMDNGISKRIVTNKMAALWHKRERQINGYIAQTVGLLFKKVKEFDIDTIVIGYNAGWKQNSHMGKKNNQKFVQIPFQKLMAAIENKCIKEGIRFFKQEESYTSKASFIDKDPVPVWSKDDKTQYRFSGKRITRGLYQSKAGTCIHADINGALNTLQKSRVVQLDDNLKVKTPILLEVQKRKAVASRIA

SEQ ID NO: 5369 - protein, 445 aa, unidentified
MKVLRKQKKREIIQRFTQKQNIGRACLTAKEFRLLQRMSHSSKVLRNVGLYTIKQSYLNHNKMATIREVDTAMQADMNYWGIQSNSVQAIRRALFTEVKSFFKALEQWKKKTEQFTGRPKFPNYSRSTDKRIIEIYQVPKVDENGYWMIPMNVAFRKKFGSIKIRMPKNLRNKNISYIEIVPKQKGRFFEVHYTYEMHLSQMKKPPTTTSNALSCDLGVDRLLSCVTNTGDAFLMDGKKLKSINQYFNKMICNLGQKNMDNGISKRIVTNKMAALWHKRERQINGYIAQTVGLLFKKVKEFDIDTIVVGYNAGWKQNSHMGKKNNQKFVQIPFQKLIAAIENKCVKEGIRFFKQEESYTSKASFLDKDPVPVWSKDDKTQYRFSGKRITRGLYQSKAGTCIHADINGALNTLKKSGVVELDGNLKVKTPILLEVQKRKAIALCIA

SEQ ID NO: 5370 - protein, 451 aa, unidentified
MARKKAVKVLRKQKKRENMQRFTQKQNIGRACLTAKEFRLLQRMSHSSKALRNVGLYTIKQSYLNNNKIATVKEVDTAMQADMNYWGIQSNSVQAIRRALFTEVKSFFKALEQWKKKPEKFTGRPKFPNYSRSTDKRIIEIYQVPKMDENGYWMIPMNVAFRKKFGSIKIRMPKNLRNKKISYIEIVPKQKGRFFEVHYTYDMHVSQMKQQSTTTSNALSCDLGVDRLVSCVTNTGDTFLIDGKKLKSINQYFNKMIHNLQQKNVDNGISKRIVTNRMAALWHKRERQINGYISQTVGLLFKKVKACNIDTVVVGYNASWKQKSDMGKKNNQTFVQIPFHKLIAAIENKCIKEGVRFFKQEESYTSKASFLDKDPVPVWSKDDRTHYRFSGKRITRGLYQSKSGRCIHSDINGALNTLEKSRVVELDESLKVKTPILLEVQKRKAVASRIA

SEQ ID NO: 5371 - protein, 451 aa, unidentified
MARKKAVKVLRKQKKRETMQRFTQKQNIGRACLTAKEFRLLQRMSHSSKALRNVGLYTIKQSYLNHNKMATIKEVDTAMQADMNYCGMQSNSVQAIRRALFTEVKSFFKALEQWKKNPEKFTGRPKFPNYSRSTDKRIIEIYQVPKVDDNGYWIIPMNVAFRKKFGSIKIRMPKNLRNKKISYIEIVPKQKGRFFEVHYTYEMHVSQMKKPPTTTSNALSCDLGVDRLVSCVTNTGEAFLIDGKKLKSINQYFNKMIRNLQQKNVENGISKRVVTNRMAAIWHKRERQINGYISQTVGLLFKKVKAFDIDTIVVGYNTGWKQKSDMGKKNNQKFVQIPFHKLIAAIENKCIKKGIRLFKQEESYTSKGSFLDKDLVPVWSKDDRTHYRFSGKRITRGLYKSKEGTCIHADINGALNTLQKSRVVELDDNLKVKTPILLEVQKRKAVASRIA

SEQ ID NO: 5372 - protein, 451 aa, unidentified
MARKKAVKVLRKQKKREKMQRFTQKQNIGRTILTAKEFRLLERMSHSSKALRNVGLYTMKQSYLNNNRMATVKEVDTAMQADMNYSGVQSNSVQAIRRALFTEVKSFFKAMEQWKKHPDKFTGRPKFPNYSRSTDKRIIEIYKVPKVGDNGYWIIPMNVAFRKKFGSIKIRMPKNLRHKKISYIEIVPKQKGRFFEVHYTYEMHVSQMKKPSTTTSNALSCDLGVDRLVSCVTNTGDAFLIDGKKLKSINQYFNKTIRNLQQKNMENGLSKRVVTNKIAALWHNREKQINGYISQAVGLLFKKVKEFDIDTIVVGYNAGWKQKSHMGKQNNQKFVQIPFHKLIAAIENKCIKEGIRFLKQEESYTSKASFLDKDPVPVWSKDDRTQYRFSGKRITRGLYQSKAGTCIHADINGALNTLKKSKIVELDENLKVKTPILLEVQKRKAVTSRIA

SEQ ID NO: 5373 - protein, 451 aa, unidentified
MARKKAVKVLRKQKKRENMQRFTQKQNIGRACLTAKEFRLLQRMSHSSKALRNVGLYTIKQSYLNDNKMATVKEVDTAMQADMNYWGIQSNSVQAIRRTLFTEVKSFFKALEQWKKNPEKFTGRPKFPNYSRSTDKRIIEIYQVPKVDDNGYWMIPMSVAFRKKFGSIEIRMPKNLRNKKISYIEIVPKQKGRFFEVHYTYEMHVSQMKKLSTTTSNALSCDLGVDRLVSCVANTGDAFLIDGKKLKSINQYFNKMIRNLGQKNIENGISKRVVTNRIAALWHKRERQINGYLSQTVGLLFKKVKECSVDTVVVGYNVGWKQKSDMGKKNNQKFVQIPFQKLIAAIENKCIKEGIRFLKQEESYTSKASFLDKDPVPVWSKDDKTQYRFSGKRLTRGLYQSKAGTCIHADINGALNTLKKSNIVELDKNLKVKTPILLEVQKRKAVASRIA

SEQ ID NO: 5374 - protein, 451 aa, unidentified
MARKKAVKVLRKQKKRETIQRFTQKQNIGRSCLTAKEFRLLQRMSHSSKVLRNVGLYTIKQSYFNHNKMATVKEVDTAMQADMNYSGIQSNSVQAIRRALFTEVKSFFKAMEQWKKNPEKFTGRPKFPNYSRSTDKRIIEIYQVPKVDDNGYWMIPMNVAFRKKFGSIKIRMPKNLRHKKISYIEIVPKQKGRFFEVHYTYEMHVSQMKKLSTTTSSALSCDLGVDRLVSCVTNTGDTFLIDGKKLKSINQYFNKMICNLQQKNIENGLSKRIVTNRMAALWHKRERQINGYISQTVGLLFKKVKTFGIDTVVVGYNAGWKQKSDMGKKNNQQFVQIPFHKLIAAIENKCVKEGIRFLKQEESYTSKASFLDKDPVPVWTKDDKTHYHFSGKRISRGLYQSKAGTCIHADINGALNTLQKSKVVELDGNLKVKMPILLEVQKRKAVASRIA

SEQ ID NO: 5375 - protein, 451 aa, unidentified
MARKKAVKVLRKQKKRENMQRFTQKQNIGRACLTAKEFRLLQRMAHSSKALRNIGLYTMKQSYLNNNRMATVKEVDAAMQADMNYSGIQSNSVQAIRRSLFTEVKSFFKAMEQWKKNPEKFTGRPKFPNYSRSTDKRMIEIYQVPKVDENGYWMIPMNVAFRKKFGSIQIRVPKNLRNKNISYIEIVPKQKGRFFEVHYTYEMHVSQMKKPPTTTSNALSCDLGVDRLLSCVTNTGDAFLMDGKKLKSINQYFNKMICNLGQKNMDNGISKRIVTNKMAALWHKRERQINGYIAQTVGLLFKKVKEFNLDTIVVGYNAGWKQKSHMGKKNNQKFVQIPFQKLIAAIENKCVKEGIRFFKQEESYTSKASFLDKDPVPVWSKDDKTQYRFSGKRITRGLYQSKAGTCIHADMNGALNTLKKSGVVELDDNLKVKTPILLEVQKRKAVASRIA

SEQ ID NO: 5376 - protein, 461 aa, unidentified
MSPLRKTVKTMARKKAVKVLRKQKKREIIQRFTQKQNIGRACLTAKEFRLLQRMSHSSKALRNVGLYTIKQSYLNHNKMATIREVDTAMQADMNYWGIQSNSVQAIRRALFTEVKSFFKALEQWKKKTEQFTGRPKFPNYSRSTDKRIIEIYQVPKVDENGYWMFPMNVAFRKKFGSIKIRMPKNLRNKNISYIEIVPKQKGRFFEVHYTYEMHVSQMKKPPTTTSNALSCDLGVDRLLSCVTNTGDAFLMDGKKLKSINQYFNKMICNLGQKNMDNGISKRIVTNKMAALWHKRERQINGYIAQTVGLLFKKVKEFDIDTIVVGYNAGWKQNSHMGKKNNQKFVQIPFQKLIAAIENKCVKEGIRFFKQEESYTSKASFLDKDPVPVSSKDDKTQYRFSGKRITRGLYQSKAGTCIHADINGALNTLKKSGVVELDGNLKVKTPILLEVQKRKAIALCIA

SEQ ID NO: 5377 - protein, 451 aa, unidentified
MAKKKAVKVLRKQKKRETLRRFTQKQNIGRACLTAQEFRLLQRMSHSSKALRNVGLYTMKQSYLNHNKMATVKEVDIAMQADMNYWGIQSNSLQAIRRALFTEVKSFFKALEQWKKNPEKFTGRPKFPNYSHSTDKRIIEIYQVPKVDENGFWMIPMSVAFRKKFGSIKIRMPKNLRNKNISYIEIVPKQKGRFFEVHYTYEMHVSQMKKQPMTTSNALGCDLGVDRLVSCVTNTGDAFLIDGKKLKSINQYFNKTIRNLQQKNVENGLSKRIVTNKIAALWHKRERQIHGYIAQTVGLLFKKVKEFDIDTIVVGYNAGWKQNSHMGKKNNQKFVQIPFHKLIAAIENKCIKEGIRFFKQEESYTSKASFLDKDPVPVWSKDDRTQYRFSGKRITRGLYQSKAGTCIHADINGGLNTLQKSQVVELDGNLKVKTPILLEVQKRKAVASRIA

SEQ ID NO: 5378 - protein, 451 aa, unidentified
MARKKAVKVLRKQKKRETMQRFTQKQNIGRACLTAKEFRLLQRMSHSSKALRNVGLYTMKQSYLNHNKMATVKEVDTAMQADMNYSGIQSNSVQAIRRALYAEVKSFFKALEQWKRKQETFAGRPKFPNYSRSTDKRIIEIYQVPKVDNNGYWMIPMNVAFRKKFGSIKIRMPKNLRNKKISYIEIVPKQKGRFFEVHYTYEMHVSQMKKPSTTTSSALSCDLGVDRLVSCATNTGDAFLIDGKKLKSINQYFNKMMRNLQLKNIENGLSKRVVTNRMAALWHKRERQINGYISQTVGLLFKKVKACNIDTVVVGYNAGWKQKSDMGKKNNQTFVQIPFHKLIAAIENKCIKEGIRFLKQEESYTSKASFLNKDPVPVWSKEDRTHYLFSGKRITRGLYQSKAGTCIHADINGALNTLQKSKVVELDDNLKVKTPILLEVQKRKAVASRIA

SEQ ID NO: 5379 - protein, 411 aa, unidentified
MKLVERHIISQNHPFWSEIDHYAFLSKNLFNLANYHYRQYFFENSQKLSFNQLYHLVSKTSDYLALPTKVSKQIIRRLDQAWISYFAAFRAWKKHPEKFLGKPKIIKYKDKTKGRNLLIYSQESIYKKPLKEGICHLSMSDLKITTSLREIIEVRIVPKSSCYVIEIVYERRSETTDKQEIAGIDLGVNNLMAVTTNQTGVAPLLVNGRPLKAINTFYNKQRSRLQSQLKTRNNQPSSKRLILLTHKRNCRVENYLHTASKKVIDWCIIHQIGTLIIGHNERMKQSLNLGKRNNQQFVNIPHNRLIEMLTYKAQLKGIKVIITEESYTSQSSALDRDELPKYGEEKPLFKGKRLARGLYKMGTNQLLNADVNGAFNIIRKVIPDVIDQGIKGLPFNPVVLDPLRMTKLSSF

SEQ ID NO: 5380 - protein, 250 aa, unidentified
MGLDYSQALGCDPGVNNLLTCVSTLGKSFIVDGHKIKGVNTKYNKTVAKYKQGNTDFYWDEYLDELTHKRSCFMRDAVNKTARFIINYCLNHRIGNIVFGWGQGIKTNCNLGSKNNQNFVQIPTARLKNRIKELAESVGIKFTETEESYTSRSSFLDNDCLPVFGGEKPANWKASGKRVKRGLYETRNGKLINADCNGAANILRKVSTQLGLGLAEVRRECLSVPKRYNVFSSLKKSYRKRGETYLQCVS

SEQ ID NO: 5381 - protein, 451 aa, unidentified
MAKKKAVKVLRKQKKRENMQRFTQKQNIGRACLTAKEFRLLQRMSHSSKALRNVGLYTIKQSYLNHNKMATVKEVDTAMQVDMNYWGIQSNSVQAIRRTLFTEVKSFFKAWEQWKKNPEKFTSRPKFPNYSGPTDKRIIEIYQVPKVDENGYWMIPMSVAFRKKFGSIKIRMPKNIRNKKISYIEIVPKQKGRFFEVHYTYEMHVSQMKKQSTTTSNALSCDLGVDRLVSCVTNTGDTFLIDGKKLKSINQYFNKMICNLQQKNMENGISRRVVTNQMAALWHKRERQINGYISQTVGLLFKKVKAFGIDTVVVGYNVGWKQKSDMGKKNNQQFVQIPFHKLIAAIENKCIKEGIRFLKQEESYTSKASFLDKDPVPVWSKDDRTHYRFSGKRITHGLYQSKAGTCIHADINGALNTLKKSRVVELDDNLKVKTPILLEVQKRKAVASRIA

SEQ ID NO: 5382 - protein, 451 aa, unidentified
MTKKKAVKVLRKQKKRETLQRFTQKQNIGRACLTAKEFRLLQRMSHSSKALRNVGLYIIKQSYLNNNKMATVKEVDTAMQADMNYSGMQSNSVQAIRRALFIEVKSFFKAWEQWKKKPETFTGRPKFPNYSRSMDKRIIEIYQVPKVDDNGYWMIPMNVAFRKKFGSIKIRMPKNLRNKKISYIEIVPKQKGRFFEVHYTYEMHVSQMKKPSTTTSNALSCDLGVDRLLSCVTNTGDTFLIDGKKLKSINQYFNKMIRNLQQKNMDNGISKRIVTNQMAALWHKRERQINGYISQTVGLLFKKVKACNIDTVVVGYNAGWKQKSDMGKKNNQKFVQIPFHKLIVAIENKCVKEGIRFLKQEESYTSKASFLDKDSVPAWSKDDRTHYRFSGKRINRGLYQSRAGICIHADINGALNTLQKSKVVQLDDNLKVKTPILLEVQKRKAVASRIA

SEQ ID NO: 5383 - protein, 451 aa, unidentified
MARKKAVKVLRKQKKRENIQRFTQKQNIGRACLTAKEFRLLQRMSHSSKALRNVGLYTMKQSYLNNKKMATIKEVDTAMQADMNYWGIQSNSVRAIRRALYAEVKSFFKALEQWKKKPETFTGRPKFPNYSRSTDKRIIEIYQVPKVDDNGYWMIPMSVAFRKKFGSIKIRMPKNVRNKKISYIEIVPKQKGRFFEVHYTYEMHVSQMKKPSTTTSNALSCDLGVDRLVSCVTNTGDAFLIDGKKLKSINQYFNKKIRNLQQKNIENGISKRVVTNRMAALWHKRERQIIGYISQTVGLLFKKVKECSVDTVVVGYNAGWKQKSDMGKKNNQQFVQIPFHKLIAAIENKCIKEGIRFFKQEESYTSKASFLDKDPVPVWSKDNRAQYYFSGKRITRGLYQSKAGTCIHADINGALNTLQKSKVVELKENLKVKTPILLEVQKRKAVASRIA

SEQ ID NO: 5384 - protein, 341 aa, unidentified
MLLVEKHVIKKHNSYFKEIDNLCFLAKNLYNYANYLIRQSFIFEGKYLNYNAMEKLCQGSADYKALPAKVAQQILMRLHEAWQGFFSSLASYKEEPEKFFCSPRIPSYLHKTNGRFPCIYTIQAISKKYLKHSQIKPSKTNIVIPTNVNQIRQVRLVPKGSYYVFEVVYKRLEEPQIHTSDGIAGIDIGLNNLAAVTSNIKGFKPILVNGKPLNKINAYYHKIRSKLQSLLPSKHKTSHQIQNLTRKRNFKIYDYLHKSSRLIIDYLAANQIGTLIIGHNDKWKQSIGLGKRNNQNFVSIPFDRFISMLKYKAKLIGIKVIITEESYTSKCSFIDEEPLSK

SEQ ID NO: 5385 - protein, 451 aa, unidentified
MARKKAVKVLRKQKKRENMQRFTQKQNIGRACLTAKEFRLLQRMSHSSKALRNVGLYTIKQSYLNHNKMTTVKEVDTAMQVDMNYWGIQSNSVQAIRRTLFTEVKSFFKAMEQWKKNPEKFTGRPKFPNYSGSTDKRIIEIYQVPKVDDNGYWLIPMNVAFRKKFGSIKIRMPKNLRNKKISYIEIVPKQKGRFFEVHYTYEMHVSQMKKQSTTTSNALSCDLGVDRLLSCVTNTGDAFLIDGKKLKSINQYFNKMIRNLQLKNVGNGLSKRVVTNKMAALWHKRERQINGYISQTVGLLFKKVKACNIDTVVVGYNTGWKQKSDMGKKNNQKFVQIPFHKLIAAIENKCVKEGIRFLKQEESYTSKASFLDKDRVPVWSKDDRTHYRFSGKRITRGLYQSKAGTCIHADINGALNTLEKSRVVELDENLKVKTPILLEVQKRKAVASCIA

SEQ ID NO: 5386 - protein, 418 aa, unidentified
MYLTQSNVIRGLSKEEYSILREMCQYSNNLYNVALYHIRQYYFQEKKFLKYEENYHVCKENENYGLLQAGVSQQTLKVADRSFKSFFNLIKKAKSGEYRFKDIKMPRYREKGGMFNLILSANAINIKKGFLTVPMSREFSKLHGGKQVKIPFPKRLEGKTIKEIRICPIYNGVYFKIQYCYLQEEEPQDVSVDKVLAIDIGLENLATCVTNTGTAFIMDGRKLKSINQYWNKQKAYYQGIANKQGQKKTHRLYVLTRKRNHRTQDYIRKVARYIINYCMEHRIGTIVCGYNGDFKRSMNLGKITNQQFTQIPFGNLRETLKGLCERYGMKYIEQEESYTSTASCLDLDEIPVYKPEQPYTGAFSGKRVHRGLYQFADGRMANADVNGAANILRKSKQNFDYEELCRGLLDSPLRIRIS

SEQ ID NO: 5387 - protein, 451 aa, unidentified
MARKKVVKVLRKQKKRETMQRFTQKQNIGRACLTAKEFRLLQRMAHSSKALRNVGLYTIKQSYLNDNKMATVKEVDNAMQADMNYSGVQSNSVQAIRRALFTEMKSFFKALEQWKKHPDKFTGRPKFPNYSRSTDKRIIEIYQVPKVDENGYWMVPMNVAFRKKFGSIKIRMPKNLRNKNISYIEIVPKQKGRFFEVHYTYEMHVSQVKKQPTTTSNALSCDLGVDRLVSCVTNTGYAFLIDGKKLKSINQYFNKTIRNLQLKNMENGLSKRLVTNKIAALWHKRERQINGYIAQTVGLLFKKVKEFDIDTIVVGYNAGWKQKSHMGKKNNQKFVQIPFEKLMAAIENKCIKEGIRFFKQEESYTSKASFLDKDPVPVWSKDDKTQYRFSGKRITRGLYQSKAGTCIHADINGALNTLKKSKIVELDDNLKVKTPILLEVQKRKAIASRIA

SEQ ID NO: 5388 - protein, 414 aa, unidentified
MKLSFKYYPKLNQQQFNIMEELSYHTTKLYNIANYNCREDTVKSYVEMNKIYNNNYHKQFLHSHNYQQCLKILEKNWKSYFASIKDYKKNPNKYLGQPRQPKFKNTNNKKNEIIFTKHAIRLQDNILKLSLSKEIKNKFQVQSLNFDLYKIKMPVDLIAIKQIKIQWNNSKKQWNLNIIWAKEEVNIAKDYYNIMSIDLGLNNLATITFEDNIHSYIIDGKYVKSKNSYYYKKIARLTSIVMKQYKNSKYFKRTQQLIKLQTKRNNFIKDYIHKSSKKIIDLAIINRCHTIVIGDFKGIKQENTAKSFVQTPQQQLVEKIKYKAKLLGIKVVIQNESYTSGCSVLDLEEIGKDRYNKNRRIYRGLFKSNKGILINADVNGSYNIMRKYLKCTPKSLIKIMDNGFLDNPIRLRVA

SEQ ID NO: 5389 - protein, 417 aa, unidentified
MRLSFKFKPKLNHKQLVIIRELAWHCSKLYNTVNYKVKNNKEQKPVYTQLEKQFKNNWHNEYLHSHNRQQALKQLAQDWKSFFASLKDYNKNPQKYKGQPGPPNFKHLNSNPCEIIFTNLAIRIRDDKLLLSLSKRIQSKYNVKALNFELPEAVQSIVDSDAVQQIKIKQDHISKKWYLLIIYKVKEAKESKKSNMMAVDLGLDNLATLTFKNNSECYIINGKTIKSKNAYYNKKIARLQSIRMKQLGTSKIKDTSEIKRLRLKRRNYIRDYLHKASWKIVDLAVGNKVAIIVIGDIKNIKQSSKLKSFVQIPIQRLVELIKYKAKLNGIKVVKINESYTSGCSALDLEKINKSNYNKSRRIKRGLFKTNQGLLINADQNGSLNILRKYLKNKCILRPIKQARDNGYVANPSRLRVS

SEQ ID NO: 5390 - protein, 411 aa, unidentified
MKLVERHIISQNHPLWSEIDHYAFLSKNLFNLANYHYRQYFFENSQKLSFNQLYHLVSKTSDYLALPTKVSKQIIRRLDQAWISYFAAFRAWKKHPEKFLGKPKIIKYKDKTKGRNLLIYSQESIYKKPLKEGICHLSMSDVKLTTSRREIIEVRIVPKSSCYVIEIVYERRSETTDKQEIAGIDLGVNNLMAVTTNQTGVAPLLVNGRPLKAINTFYNKQRSRLQSQLKTRNNQPSSKRLILLTHKRNCRVENYLHTASKRVIDWCILHEIGTLIIGHNERMKQSLNLGKRNNQQFVNIPHYRLIEMLTYKAQLKGIKVIITEESYTSQSSALDRDELPKYGEEKPLFKGKRLARGLYKMGTNQLLNADVNGSFNIIRKVIPDVIDQGIKGLPFNPVVLDPLRMTKLSGF

SEQ ID NO: 5391 - protein, 411 aa, unidentified
MKLVERHIISQNHPFWSEIDHYAFLSKNLFNLANYHYRQYFFENSQKLSFNQLYHLVSKTSDYLALPTKVSKQIIRRLEQAWVSYFAAFRAWKKHPEKFLGKPKIIKYKDKNKGRNLLIYSQESIYKKPLKEGICHLSMSDLKMTTSRREIIEVRIVPKSSCYVIEIVYERRSETTDKQQIAGIDLGVNNLMAVTTNQTGVAPLLVNGRPLKAINTFYNKQRSRLQSQLKTRNNQPSSKRLIFLTHKRNCRVENYLHTASKRVIDWCTIHQIGTLIIGHNERMKQSLNLGKRNNQQFVNIPHNRLIEMLTYKAQLKGIKVIITEESYTSQSSALDRDELPKYGEEKPLFKGKRLARGLYKMGTNQLLNADVNGAFNIIRKVIPDVIDQGIKGLPFNPVVLDPLRMTKLSGF

SEQ ID NO: 5392 - protein, 451 aa, unidentified
MARKKAVKVLRKQKKREIIQRFTQKQNIGRACLTAKEFRLLQRMSHSSKALRNVGLYTIKQSYLNHNKMATIREVDTAMQADMNYWGIQSNSVQAIRRALFTEVKSFFKALEQWKKKTEQFTGRPKFPNYSRSTDKRIIEIYQVPKVDENGYWMIPMNVAFRKKFGSIKIRMPKNLRNKNISYIEIVPKQKGRFFEVHYTYEMHVSQMKKPPTTTSNALSCDLGVDRLLSCVTNTGDAFLMDGKKLKSINQYFNKMICNLGQKNMDNGISKRIVTNKMAALWHKRERQINGYIAQTVGLLFKKVKEFDIDTIVVGYNAGWKQNSHMGKKNNQKFVQIPFQKLIAAIENKCVKEGIRFFKQEESYTSKASFLDKDPVPVWSKDDKTRYRFSGKRITRGLYQSKAGTCIHADINGALNTLKKSGVVELDGNLKVKTPILLEVQKRKAIALCIA

SEQ ID NO: 5393 - protein, 451 aa, unidentified
MARKKAVKVLRKQKKRENMQRFTQKQNIGRACLTAKEFRLLQRMSHSSKALRNVGLYTIKQSYLNHNKMATVKEVDTAMQADTNYWGMQSNSVQAIRRALFTEVKSFFKAMEQWKKNPEKFTGRPKFPNYSRSTDKRIIEIYQVPKVDDNGYWMIPMNVAFRKKFGSIKIRMPKNVRNKKISYIEIVPKQKGRFFEVHYTYEMHVSQMKKQSTTTSNALSCDLGVDRLLSCATNTGDAFLIDGKKLKSINQYFNKMIRNLQQKNMDTGISKRIVTNKMAALWHKRERQINGYISQTVGLLFKKVKACNIDTVVVGYNAGWKQKSDMGKKNNQTFVQIPFHKLLAAIENKCVKEGIRFLKQEESYTSKASFLDKDRVPVWSKDDRSHYRFSGKRITRGLYQSKAGKCIHADINGALNTLQKSRVVELDDNLKVKTPILLEVQKRKAVASRIA

SEQ ID NO: 5394 - protein, 451 aa, unidentified
MTRKKAVKVLRKQKKRENMQRFTQKQNIGRACLTAKEFRLLQRMSHSSKALRNVGLYTMKQSYLNHNRMATVKEVDTAMQADTNYWGVQSNSVQAIRRALFTEVKSFFKALEQWKKNPEKFTGRPKFPNYSRSTDKRIIEIYQVPKVDENGYWMIPMNVAFRKKFGSIKIRMPKNLRNKNISYIEIVPKQKGRFFEVHYTYEMHVSQMKKPSTTTSNALSCDLGVDRLLSCVTNTGDAFLIDGKKLKSINQYFNKIICNLQQKNMDNGISKRIVTNKIAALWHKRERQINGYIAQALGLLFKKVKEFDIDTVVVGYNTGWKHKSHMGKKNNQKFVQIPFQKLIAAIENKCVKEGIRFFKQEESYTSKASFLDKDPVPVWSKDDKTQYRFSGKRITRGLYQSKAGTCIHADINGALNILKKSGVVELDENLKVKTQILLEVQKRKAIASRIA

SEQ ID NO: 5395 - protein, 451 aa, unidentified
MARKKAVKVLWKQKKREKMQRFTQKQNIGRTILTAKEFRLLERMSHSSKALRNVGLYTMKQSYLNNNRMATVKEVDTAMQADMNYSGVQSNSVQAIRRALFTEVKSFFKAMEQWKKHPDKFTGRPKFPNYSRSTDKRIIEIYKVPKVDDNGYWIIPMNVAFRKKFGSIKIRMPKNLRHKKISYIEIVPKQKGRFFEVHYTYEMHVSQMKKPSTTTSNALSCDLGVDRLVSCVTNTGDAFLIDGKKLKSINQYFNKTIRNLQQKNMENGLSKRVVTNKIAALWHNREKQINGYISQAVGLLFKKVKEFDIDTIVVGYNAGWKQKSHMGKQNNQKFVQIPFHKLIAAIENKCIKEGIRFLKQEESYTSKASFLDKDPVPVWSKDDRTQYRFSGKRITRGLYQSKAGTCIHADINGALNTLKKSKIVELDENLKVKTPILLEVQKRKAVTSRIA

SEQ ID NO: 5396 - protein, 413 aa, unidentified
MKLSFKFRPNVSSKQLEIIEELSYHTTKLYNIINYALRENGFKNYYNIELEFKNNWHCDFLHSHTRQQMFKVLEQNWKSYFASIKDYEVNPSKYKGIPRRPKFKNVDKNKNEIIFTNIAIRFQDGILKLSLSKAIQRLFEVESLNFEVSNKLQSLIDWNSLQQARLTYDKVQKCWCLIVIYNKLEKENNNSNIMAIDLGLDNLATLTFKEGNETYIFCGKKLKSVNAYANKKIAYLQSIEMQKCGSDKFKNTKEINRLRRYRNNYIDDYLHKVSKNIIDKAIEHEVKKIVIGKLKGIKQDMNYNKSFVQIPIQRLAELIKYKAKLQGIEVKFKEESYTSGCSAFDLEPINKKYYDKTRRVVRGLFKSSFGLVNSDINGSLNILRKEEKCIPQLVKTMRDKGKCSRPLRIRVAC

SEQ ID NO: 5397 - protein, 451 aa, unidentified
MAKKKAVKVLRKQKKRETLRRFTQKQNIGRACLTAQEFRLLQRMSHSSKALRNVGLYTMKQSYLNHNKMATVKEVDTAMQADMNYWGIQSNSVQAIRRALFTEVKSFFKALEQWKKNPEKFTGRPKFPNYSHSTDKRIIEIYQVPKVDENGFWMIPMSVAFRKKFGSIKIRMPKNLRNKNISYIEIVPKQKGRFFEVHYTYEMHVSQMKKQPMTTSNALGCDLGVDRLVSCVTNTGDAFLIDGKKLKSINQYFNKTIRNLQQKNVENGLSKRIVTNKIAALWHKRERQIHGYIAQTVGLLFKKVKEFDIDTIVVGYNAGWKQNSHMGKKNNQKFVQIPFHKLIAAIENKCIKEGIRFFKQEESYTSKASFLDKDPVPVWSKDDRTQYRFSGKRITRGLYQSKAGTCIHADINGALNTLQKSQVVELDGNLKVKTPILLEVQKRKAVASRIA

SEQ ID NO: 5398 - protein, 275 aa, unidentified
MKVLRKQKKREIIQRFTQKQNIGRACLTAKEFRLLQRMSHSSKALRNVGLYTIKQSYLNHNKMATIREVDTAMQADMNYWGIQSNSVQAIRRALFTEVKSFFKALEQWKKKTEQFTGRPKFPNYSRSTDKRIIEIYQVPKVDENGYWMIPMNVAFRKKFGSIKIRMPKNLRNKNISYIEIVPKQKGRFFEVHYTYEMHLSQMKKPPTTTSNALSCDLGVDRLLSCVTNTGDAFLMDGKKLKSINQYFNKMICNLGQKNMDNGISKRIVTNKMAAL

SEQ ID NO: 5399 - protein, 413 aa, unidentified
MYLTQKNQIRGLKTNEFTALKELCRLSKNLYNVGLYTVRQYYFQERKHLKYESNYHHCKGNENYRMLNTDIAQQTLKVVDRTFRSFYGLITSVKSGSYSRKVRLPHYLPKDGYFPLIMPRVQVKDGKFRIPMSAAFKAEYGEIWIPFPERLNQETLKQVRILPKYNGRFFEVEFISEAKETPIETKSESAISIDLGLDNLATCIDTNGASFILDGKPLKSFNQWFNKENARLQSIKDLQKIKGTTERQARLTVNRNAKVRDYLNKAARYVINHCIEHRIDKLVVGFNIEMKQSINIGSRNNQNFVQIPHSSFRFKLKALCERYGIKYVEQEESYTSKASFLDNDTIPVFNADNPKKYEFSGRRVKRGLYRTQHGILVNSDCNGAANILRKSKHNALSGVSRGCLAQPLRVKIS

SEQ ID NO: 5400 - protein, 451 aa, unidentified
MARKKAVKVLRKQKKRETMQRFTQKQNIGRACLTAKEFRLLQRMSHSSKALRNVGLYTIKQSYLNDNRVATVKEVDNAMQADMNYSGVQSNSVQAIRRALFTEVKSFFKALEQWKKHPDKFTGRPKFPNYSYSTDKRIIEIYQVPKVDENGYWIIPMNVAFRKKFGSIKIRMPKNLRNKKISYIEIVPKQKGRFFEVHYTYEMHVSQMKKQPMTTSNALGCDLGVDRLVSCVTNTGDAFLIDGKKLKSINQYFNKMICNLQQKNVENGLSKRIVTNKIAALWHKRERQIYGYIAQTVGLLFKKVKEFDIDTIVVGYNAGWKQKSHMGKKNNQKFVQIPFQKLIAAIENKCVKEGIRFFKQEESYTSKASFLDKDPVPVWSKDDRTQYRFSGKRITRGMYQSKAGTCIHADMNGALNTLKKSGVIELDDNLKVKTPILLEVQKRKAVASRIA

SEQ ID NO: 5401 - protein, 451 aa, unidentified
MTRKKAVKVLRKQKKRETMQRFTQKQNIGRACLTAKEFRLLQRMSHSSKALRNVGLYTMKQSYLNHNKMATVKEVDTTMQADMNYWGIQSNSVQAIRRALYAEVKSFFKAMEKWKKNPEKFTGRPKFPNYSRSTDKRIIEIYQVPKVDDNGYWMIPMSVAFRKKFGSIKIRMPKNLRNKNISYIEIVPKQKGRFFEVHYTYEMHVSQMKKQSATTSNALSCDLGVDRLVSCVTNTGDTFLIAGKKLKSINQYFNKMIRNLQQKNIENGLSKRVVTNQMAALWHKRERQINGYISQTVGLLFKKVKAFGIDTIVVGYNVGWKQRSDMGKKNNQTFVQIPFHKLIAAIENKCIKEGIRFLKQEESYTSKASFLDKDPVPVWSKDDKTYYRFSGKRITRGLYKSKAGTCIHADINGALNTLKKSRVVELDESLKVKTPILLEVQKRKAVASRIA

SEQ ID NO: 5402 - protein, 451 aa, unidentified
MARKKAVKVLRKQKKRETIQRFTQKQNIGRACLTAKEFRLLQRMSHSSKALRNVGLYTIKQGYLNDNKMATVKEVDTAMQADMNYWGIQSNSVQAIRRALFTEVKSFFKALEQWKKNPEKFTGRPKFPNYSRSTDKRIIEIYQVPKVDENGYWMIPMNVAFRKKFGSIKIRMPKNLRNKKISYIEIVPKQKGRFFEVHYTYEMHVSQMKKLSTTTSNALSCDLGVDRLVSCVTNTGDAFLIDGKKLKSINQYFNKTIRNLQQKNMGNGLSKRIVTNKMAALWHKRERQINGYISQTVGLLFKKVKAFDIDTIVVGYNTGWKQKSDMGKKNNQTFVQIPFHKLMAAIENKCVKEGIRFLKQEESYTSKASFLDKDPVPVWSKDDKMHYLFSGKRITRGLYQSKAGTCIHADINGALNTLQKSRVVEWDDNLKVKTPILLEVQKRKAVASRIA

SEQ ID NO: 5403 - protein, 451 aa, unidentified
MARKKAVKVLRKQKKREKMQRFTQKQNIGRTILTAKEFRLLERMSHSSKALRNVGLYTMKQSYLNNNRMATVKEVDTAMQADMNYSGVQSNSVQAIRRALFTEVKSFFKAMEQWKKHPDKFTGRPKFPNYSRSTDKRIIEIYKVPKVDDNGYWIIPMNVAFRKKFGSIKIRMPKNLRHKKISYIEIVPKQKGRFFEVHYTYEMHVSQMKKPSTTTSNALSCDLGVDRLVSCVTNTGDAFLIDGKKLKSINQYFNKTIRNLQQKNMENGLSKRVVTNKIAALWHNREKQINGYISQAVGLLFKKVKEFDIDTIVVGYNAGWKQKSHMGKQNNQKFVQIPFHKLIAAIENKCIKEGIRFLKQEESYTSKASFLDKDPVPVWSKDDRTQYRFSGKRITRGLYQSKAGTCIYADINDALNTLKKSKIVELDENLKVKTPILLEVQKRKAVTSRIA

SEQ ID NO: 5404 - protein, 451 aa, unidentified
MARKKAVKVLRKQKKREKIQRFTQKQNIGRACLTAKEFRLLQRMSHSSKALRNVGLYTIKQSYLNHNKMATVNEVDTAMQADMNYSGIQSNSVQAIRRALFTEVKSFFKALEQWKKNPETFTGRPKFPNYSPSTDKRIIEIYQVPKVDENGYWIIPMSVAFRKKFGSIKIRMPKNVRNKKISYIEIVPKQKGRFFEVHYTYEMHVSQMKKPSTTTSNALSCDLGVDRLVSCVTNTGDAFLIDGKKLKSINQYFNKMICNLQQKNMENGISKRVVTNKVAAIWHKRERQINGYISQTVGLLFKKVKAFDIDTIVIGYNTGWKQKSDMGKKNNQTFVQIPFHKLIAAIENKCVKEGIRFLKQEESYTSKASFLDKDPVPVWSKDDRTHYRFSGKRITRGLYQSKAGTCIHADINGALNTLQKSRVVELDDNLKVKTPILLEVQKRKAVASRIA

SEQ ID NO: 5405 - protein, 434 aa, unidentified
MIYLYGCQQVLIHVDKDLKAILEFICSEANKLSNCAVYYARQIWFKAKRYITKFELDSEMKSNRHFQTLYSQAAQQLCHSVYESFASFKQLNALYNRGELADKPRPPKYRKNGFNLVSYPKQALKLNDGQVRIPLGSQVKAWFKLDSFSLPMPSNLRFEDIKKVRILPKNRCFYAEFVYKTTTVKPDVDKSNVLGIDHGLNNWLTCLSNVGTSFIVDGKHIKSLNRWYNKQVATIKENKSQGFWSNKLATITEKRNRQIRDAINKVGRIVINHCLDNRIGRVIFGWGQGIKQEINLGKKRNQQFVQIPTARLKGRIEQLCQQYSIEFVETEEANTSAASFVDADTLPKHGEKPDSWKSSGRRIKRGLFRTAMNWYINADCNGAANIIRKVSTTLGLDLSGVSRGALTHPTRICIWVTAKKKPSDVVLTRRVASF

SEQ ID NO: 5406 - protein, 451 aa, unidentified
MAKKKAVKVLRKQKKRETIQRFTQKQNIGRACLTAKEFRLLQRMSHSSKALRNVGLYTIKQSYLNNNKMATVKEVDTAMQADMNYSGVQSNSVQAIRRALFTEVKSFFKALEQWKKKPETFTGRPKFPNYSRSTDKRIIEIYQVPKVDDNGYWMIPMNVAFRKKFGSIKIRMPKNLRNKKISYIEIVPKQKGRFFEVHYTYEMHVSQMKKPPTTTSNALSCDLGVDRLVSCVTNTGDTFLIDGKKLKSINQYFNKMIRNLQQKNMENGISKRIVTNKIAALWHKRERQINGYISQTVGLLFKKVKAFDIDTIVVGYNTGWKQKSDMGKKNNQKFVQIPFHKLIAAIENKCVKEGIRFLKQEESYTSKASFLDKDRVPVWSKDDRTQYRFSDKRTTRGLYQSKAGTCIHADINGALNTLQKSKVVELDDNLKVKTPILLEVQKRKAVASRIA

SEQ ID NO: 5407 - protein, 451 aa, unidentified
MARKKAVKVLRKQKKRETMQRFTQKQNIGRACLTAKEFRLLQRMSHSSKALRNVGLYTIKQSYLNDNRVATVKEVDNAMQADMNYSGVQSNSVQAIRRALFTEVTSFFKALEQWKKHPEKFTGRPKFPNYSRSTEKRIIEIYQVPKVDENGYWIIPMNVAFRKKIGSIRIRMPKNLRNKKISYIEIVPKQKGRFFEVHYTYEMHVSQMKKRPMTTSNALGCDLGVDRLVSCMTNTGDAFLIDGKKLKSINQYFNKMICNLQQKNVENGLSKRIVTNKIAALWHKRERQIHGYIAQTVGMLFKKVKEFDIDTIVVGYNAGWKQKSHMGKKNNQTFVQIPFHKLMAAIENKCVKEGIRFLKQEESYTSKASFLDKDPVPVWAKDDKMQYHFSGKRITRGLYKSKAGICIHADINGALNTLKKSKVVELDDNLKVKTPILLEVQKRKAVASRIA

SEQ ID NO: 5408 - protein, 451 aa, unidentified
MARRKAVKVLRKQKKRETMQRFTQKQNIGRACLTAKEFRLLQRMSHSSKALRNVGLYTMKQSYLNNKKMATVKEVDSAMQADMNYWGMQSNSVQAIRRALFTEVKSFFKALEQWKKKPETFTGRPKFPNYSRSTDKRIIEIYQVPKVDENGYWMIPMNVAFRKKFGSIKIRMPKNLRNKKISYIEIVPKQKGRFFEVHYTYEMHVSQMKKPSTTTSNALSCDLGVDRLVSCVTNTGDTFLIDGKKLKSINQYFNKMICNLQQKNMDNGISKRIVTNRMAALWHKRERQINGYISQTVGLLFKKVKEFDIDTIVVGYNTGWKQKSDMGKKNNQKFVQIPFYKLIAAIENKCIKEGIRFFKQEESYTSKASFLDKDPVPVWSKDDSTHYRFSGKRITRGLYQSKAGTCIHADINGALNTLQKSRVVEWDDNLKVKTPILLEVQKRKAVASRIA

SEQ ID NO: 5409 - protein, 459 aa, unidentified
MYYKTVKTLLTNNIDDECHAYLKFACEQSNKLYNSAVYVVRQAHFEQCSVRTFFDKNDFYRTSLKLSKVKVSYPQLCKELKDNCHYQAIGGSQAQQTIKSSVEGFKAYNKLLPMWFKGELSNKPKLPIYRKNGLYPVVFTGQNLRFTADGSHCYISIPKSQKDELVTGRLTIPCGKGITKDNIAELRIIPSNGKLWAEFVYKSPERKARGLDYSQAIGIDSGVSNLLTVVSTEGKSFILCGKRLKFINQKYNKFVAKYKEGKSEFYWDENLDEVTHKRNCQIRDTVNKYARFLINYCLAHKIGNIVFGWGVGVKTKANLGKKNNQNFVQLPTARLKNRIKELAGEVGIMFTETEESYTSKSSFLDGDLLPKYGEKPKEYKFSGKRVQRGLYKIANGKTINADCLGAINILKKVSTQLGLDLAKVRRGALTLPKRYDASLLNKSYRKRSEQVLTCVATSA

SEQ ID NO: 5410 - protein, 459 aa, unidentified
MYYKIIRTLLNNNINDECYAYLQLACEQSNKLFNSTVYAVRQFHFANCSIRTFFDKEDLYRSSFKLGKVKVSYPQLCKDLKINDHYQAIGGNQGQQTIKSVVESFKSYNKLLSMWFKGELSNKPKLPNYRKNGLYQISFVGRDIKFAMDGLSCYLPIPRSQKDELITGKLKIPCAKGVTTDNIAELRIVPSLGKLWAEYVYKAPEKKATELDYSQAIGIDSGINNFITAVSNTGKSFILCGKHLKFTNQKYNKTVAQYKEGKSDFYWDDYLNEITHKRNCQIKDSVNKYARFVINYCLNHRIGNIVFGWGQGVKSEVNLGKRNNQNFVQLPTARLKNRIKELAHEVGIKFAETEESYTSKSSFLDGDLLPKYGEKPKECKFSGKRVQRGLYRTSNGQTINADCLGAINILKKVSIQLGLNLAEVCRGVLTLPKRYRVNDLTKSYRKRSEQVLTCVATSA

SEQ ID NO: 5411 - protein, 451 aa, unidentified
MTRKKAVKVLRKQKKRETMQRFTQKQNIGRACLTAKEFRLLQRMSHSSKALRNVGLYTMKQSYLNHNKMATVKEVDTAMQADMNYWGIQSNSVQAIRRALYAEVKSFFKAMEKWKKNPEKFTGRPKFPNYSRPTDKRIIEIYQVPKVDDNGYWMIPMSVAFRKKFGSIKIRMPKNVRNKKISYIEIVPKQKGRFFEVHYTYEMHVSQMKKQSATTSNALSCDLGVDRLVSCVTNTGDTFLIAGKKLKSINQYFNKMIRNLQQKNIENGLSKRVVTNQTAALWHKRERQINGYISQTVGLLFKKVKAFGIDTIVVGYNVGWKQRSDMGKKNNQTFVQIPFHELIAAIENKCIKEGIRFLKQEESYTSKASFLDKDPVPVWSKDDKTYYRFSGKRITRGLYKSKAGTCIHADINGALNTLKKSRVVELDESLKVKTPILLEVQKRKAVASRIA

SEQ ID NO: 5412 - protein, 451 aa, unidentified
MAKKKAMKVLRKQKKRENMQRFTQKQNIGRACLTAKEFRLLQRMSHSSKALRNVGLYTIKQSYLNNNKMATVKEVDTAMQTDMNYWGIQSNSVQAIRRALFTEVKSFFKALEQWKKKTETFTGRPKFPNYSGSTDKRIIEIYQVPKVDDNGYWMIPMNVAFRKKFGSIKIRMPKNLRNKKISYIEIVPKQKGRFFEVHYTYEMHVSQMKKQSTTTSNALSCDLGVDRLLSCVTNTGDAFLIDGKKLKSINQYFNKMIRNLQLKNIENGLSKRVVTNQMAAFWHKRERQINGYISQTVGLLFKKVKACNIDTVVVGYNAGWKQKSDMGKKNNQTFVQIPFHKLISAIENKCVKEGIRFLKQEESYTSKASFLDKDTIPVWSKDDRTHYRFSGKRITRGLYQSKAGKCIHADINGALNTLKKSRVVELDDNLKVKTPILLEVQKRKAVASCIA

SEQ ID NO: 5413 - protein, 391 aa, unidentified
MLFKVGKYLNNAELDKIMKTNVHFRALRSACAQQTLHGVIESFKSYKALKKKYDKGQLTDKPRVPKYRKKGGLSVVSYPARWVKLVKGQLKFTLGKQVKAWFGIDHFLLPMPSNIDFKSIKEYRFVPRNGCFYLEFVYERPKPKPVTPTENVLGIDPGLNNWLTCVSNIGKSFIVDGRKVKSQNQWYNKRVSAIKKGKQWDYWDEKLASLTERRNCQMRDNVNKAARFVVNWCIRHQISIVVFGWNKRNKDGINIGKKNNQQFVQIPTAKLKNRIEQLCIEYGIKFIETEESYTSKASFLDNDFLPTLGGKPKGWKESGRRVKRGLYRSRKGELINADCNGAGNILRKVETQLGFPLAKVCRAVLSLPQRYRLDSLSKSYREATSRRGATP

SEQ ID NO: 5414 - protein, 461 aa, unidentified
MSPLRKTVKTMARKKAVKVLRKQKKREIIQRFTQKQNIGRACLTAKEFRLLQRMSHSSKALRNVGLYTIKQSYLNHNKMATIREVDTAMQADMNYWGIQSNSVQAIRRALFTEVKSFFKALEQWKKKTEQFTGRPKFPNYSRSTDKRIIEIYQVPKVDENGYWMIPMNVAFRKKFGSIKIRMPKNLRNKNISYIEIVPKQKGRFFEVHYTYEMHVSQMKKPPTTTSNALSCDLGVDRLLSCVTNTGDAFLMDGKKLKSINQYFNKMICNLGQKNMDNGISKRIVTNKMAALWHKRERQINGYIAQTVGLLFKKVKEFDIDTIVVGYNAGWKQNSHMWKKNNQKFVQIPFQKLIAAIENKCVKEGIRFFKQEESYTSKASFLDKDPVPVWSKDDKTQYRFSGKRITRGLYQSKAGTCIHADINGALNTLKKSGVVELDGNLKVKTPILLEVQKRKAIALCIA

SEQ ID NO: 5415 - protein, 423 aa, unidentified
MATYAVQSNVIRGLSKKQYALLKEMCQYSNSLYNVALYNIRQHYFNTKKFLTYESNYHECKENENYVYLQAGVAQQTMKVVDRSFKSFFNLIKKCKIGDYRYHDVKMPHYRKKSGLFNLVFSTNAIAIKDGMFKVAMSRAFRSMHPDVKEISIPFPERLKDTTIKEVRILPCNGGKFFKIQYVYEVTPEVLNLNKDNILSIDLGIDNLATCVSTIGTPFIMDGRRIKSINHRWNKEMARLRSISMKQGLKTTAKIQKITTKRNNQVNDTIKKTARYIINYCIKNDIGTLIVGYNADFKRNSNIGKVNNQNFVQIPLGDLRQQLEFLCWKYGLDYFEQEESYTSKASFLDKDKIPVYKPEQPYKGTFSGKRVHRGLYKSKKGTTINADVNGSANIMRKCKQNLDYEKLCNGLLTSPRRIRFAYL

SEQ ID NO: 5416 - protein, 451 aa, unidentified
MARKKAVKVLRKQKKRETMQRFTQKQNIGRACLTAKEFRLLQRMSHSSKALRNVGLYTMKQSYLNHNRMATVKEVDTAMQADMNYWGIQSNSVQAIRRALYAEVKSFFKALEQWKKKTETFTGRPKFPNYSRSTDKRIIEIYQAPKVDENGYWMIPMSVAFRKKFGSIKIRMPKNIRNKKISYIEIVPKQKGRFFEVHYTYEMHVSQMKKLSTTTSNALSCDLGIDRLVSCVTNTGDAFLIDGKKLKSINQYFNKMIRNLQLKNVENGLSKRVVTNKMSALWHKRERQINGYISQTVGLLFKKVKACNIDTVVVGYNVGWKQKSDMGKKNNQTFVQIPFHKLLAAIENKCVKEGIRFFKQEESYTSKASFLDKDPVPVWSKDDRTHYRFSGKRMTRGLYQSKSGKCIHADINGALNTLEKSRVVQLVDNLKVKTPILLEVQKRKAVASRIA

SEQ ID NO: 5417 - protein, 430 aa, unidentified
MYGCQQHLITTDPDNRAVLEFICGEANKLTNCAIYYCRQVLFKAGKYVKKFELDKILKTNIHFRAMRSACAQQILHSVIESFKSYQALAKLYKSGKLRDKPRVPKYRKKGGMAVVSYPARWVKLKDGQLKFSLGNQVKAWFGIDHFLLPMPSNLDFKSINEFRFVPRNGCFYLEFVYKQSDIEPVQTSGNALGIDPGLNNWLTCVSTTGKSFIIDGRKIKSQNQWYNKQVAKIKKGKPQDYWDERLANITEKRNRQMRDNINKAAKFFINWCLRNQISTVVFGWNQRNKDGIKIGKKNNQEFVQIPTARLKNRVQQLCEQYGIKFIETEESYTSKASFLDKDFLPTLGAKPKGWKPSGKRIRRGLYRSANNELINADCNGACNILRKVATQLGVDLAEVGRAALNLPQRYRLDSLSSQYCKHHAARFQPA

SEQ ID NO: 5418 - protein, 419 aa, unidentified
MYLTQSNQIRGLSKEQFQQLREMCHYAKNLYNVGLYNIRQHYFVEKTFLKYESNYHVAKTNENYKLIQAGVSQQILKVVDRSFKSFFNLIKKAKKGEYRFQDIKMPGYLKKDGLFNLIFSTNAINIKDDFFRVAVSNAYKKLHPDYQDILIPFPSRLKGKKIKEVRIVPRNNGQYFHIQYVYEQICEKVELDFNKALAIDIGLNNLASCVDSDGASFLVDGKRLKSINRLYNKEKARLQSVAMKQGLKYTKRMDSLTLKRNNQVQDYIKKTTRIIVNYCLKNQIGNLVIGYNEDFKRNINIGKKNNQQFTQIPFGNLREQLSNLCEHYGIFYKEQEESYTSKASFYDNDELPKWNPADETKYHFSGKRIKRGLYRTSTGYKFNADINGALNILRKSNLLDCKILQARGSLARPSRIRVV

SEQ ID NO: 5419 - protein, 451 aa, unidentified
MARKKAVKVLRKQKKRETMQRFTQKQNIGRACLTAKEFRLLQRMSHSSKALRNVGLYTIKQSYLNDNRMATVKEVDNAMQADMNYSGVQSNSVQAIRRALFTEVKSFFKALEQWKKHPEKFTGRPKFPNYSRSTDKRIIEIYQVPKVDENGYWIIPMNVTFRKKFGSIKIRMPKNLRNKKISYIEIVPKQKGRFFEVHYTYEMHVSQMKKQSTTTSNALSCDLGVDRLVSCVTNTGDAFLIDGKKLKSINQYFNKMIRNLQLKNMENGLSKRVVTNKMAALWQKRERQINGYISQAVGLLFKKVKACNIDTIVIGYNVAWKQKSDMGKKNNQTFVQIPFHKLIAAIENKCIKEGIRFLKQEESYTSKASFLDKDPVPVWAKDDRTQYRFSGKRITRGLYQSKSGTCIHADMNGALNTLRKSRVVELDDNLKVKTPILLEVQKRKAVASRIA

SEQ ID NO: 5420 - protein, 411 aa, unidentified
MKLVERHIISQNHPLWSEIDHYAFLSKNLFNLANYHYRQYFFENSQKLSFNQLYHLVSKTSDYLALPTKVSKQIIRRLDQAWISYFAAFRAWKKHPEKFLGKPKIIKYKDKTKGRNLLIYSQESIYKKPLKEGICHLSMSDVKLTTSRREIIEVRIVPKSSCYVIEIVYERRSETTDKQEIAGIDLGVNNLMAVTTNQTGVAPLLVNGRPLKAINTFYNKQRSRLQSQLKTRNNQPSSKRLIFLTHKRNCRVENYLHTASKRVIDWCIIHQIGTLIIGHNERIKQCLNLGKRNNQQFVNIPHYRLIEMLTYKAQLKGIKVIITEESYTSQSSALDRDELPKYGEEKPLFKGKRLARGLYKMGTNQLLNADVNGSFNIIRKVIPDVIDQGIKGLPFNPVVLDPLRMTKLSGF

SEQ ID NO: 5421 - protein, 416 aa, unidentified
MYGCQQILIHATPDIEAIIKYLCLESNKVYNCALYYARQMFFKKQVFVNRGAVCSEMSKSANRHFKAMYVSSAQQTCNSVVEAMSSYKELVKLWKTGKLEEKPRPPQYRKQGLFTVSYPIRWLKLTPQGIRIPLGNQVKVWFGIDSFLLPMPSNLNWDSIKEVRILPRNKCFYAEFVYQVQTENIELDQNKVLGIDHGIDNWLTCISNIGTSFIIDGKHLKSLNQWYNKQVANHKHDKPQGFWSNSLSALTEKRNRQVRDAINKAARLVINHCIENSIGRIVFGWNQGQKDGATLGNKGNQNFIQIPTARLKSRIQELCSRYGIEFVETEESYTSKASFVDQDFLPKFGEKPDNWESSGKRVKRGLYRTAFNQYINADCNAAANIIRKVSATLGLNLNGVSSGALTTPLRVRLWTT

SEQ ID NO: 5422 - protein, 416 aa, unidentified
MYGCQQVLIHASPDIEAIIEYLCSESNKVYNCALYYARQMFFKKHVFVNRGAVCSEMSKSANLHFKAMYVSSAQQTCNSVVEAMSSYKELLKLWRTGKLEEKPRPPKYRKPGLFTVSYPVRWLKLTPEGIRIPLGNQVKAWFGIDSFLLSMPSNLNWDSIKEVRILPRNKCFYAEFVYQVQAESVELDKNKVLGIDHGIDNWLTCVSNIGTSFIVDGKHLKSLNQWYNKQVADHKNGKPQGFWSNALSALTEKRNRQVRDAINKAARLVINHCIENSIGRIVFGWNKGQKDGAALGKKGNQNFIQIPTARLKSRIQELCSRYGIEFIETEESYTSKASFLDHDFLPEFGEKPDNWKPSGKRVKRGLYRTAFNQYINADCNAATNIIRKVSATLGLNLNGVSSGALTTPLRVRIWTT

SEQ ID NO: 5423 - protein, 418 aa, unidentified
MYLTQSNVIRSLSKEEYAMLREMCQYSNNLYNVALYNIRQYYFQEKKFLKYEENYHVCKENENYGLLQAGVSQQILKVADRSFKSFFNLIKKAKSGEYRFKDIKMPHYREKGGMFNLILSTNAINVKDGFLTIPMSRGFSKRHGRKPIKIPFPARLKEKTIKEVRICPVYNGRYFKIQYCYLQEKEPQDVSPDNVLAIDIGLENLATCVTNTGTAFIMDGRKLKSINQYWNKQKAYYQGIADKQGQKKTHRLYSLARKRNNRTQDYLRKIARYIINYCIEHHIGTIVCGYNGDFKRSIDLGRITNQQFTQISFGNLRETLEGLCERYGMRYIEQEESYTSQASGLDLDDIPVYNPEQPYTGTFSGKRIHRGLYQFADGRMANADVNGAYNILRKSKQNFDFEGLCKGLLDSPLRIRIS

SEQ ID NO: 5424 - protein, 451 aa, unidentified
MTRKKAVKVLRKQKKRENMQRFTQKQNIGRACLTAKEFRLLQRMAHSSKALRNVGLYTMKQSYLNHNRMATVKEVDAAMQNDMNYSGVQSNSVQAIRRSLFTEVKSFFKAMEQWKKNPEKFTGRPKFPNYSRSTDKRIIEIYQVPKVDENGYWMIPMNVAFRKKFGSIKIRMPKNLRNKNISYIEIVPKQKGRFFEVHYTYEMHVSQMKKPSTTTSNALSCDLGVDRLVSCVTNTGDAFLIDGKKLKSINQYFNKMICNLGQKNMDNGISKRIVTNKMAALWHRRERQINGYIAQTVGLLFKKVKEFDIDTIVIGYNAGWKQKSHMGKKNNQKFVQIPFQKLMAAIENKCVKEGIRFFKQEESYTSKASFFDKDPVPVWSKDDKTQYRFSGKRMTRGLYQSKAGTCIHADINGALNTLKKSGVVELDDNLKVKTPILLEVQKRKAVASRIA

SEQ ID NO: 5425 - protein, 451 aa, unidentified
MARKKVVKVLRKQKKRETIQRFTQKQNIGRVCLTAQEFRLLQRMSHSSKALRNVGLYTMKQSYLNHNKMATVKEVDTAMQADMNYWGIQSNSVQAIRRALFTEVKSFFKALEQWKKNPEKFTGRPKFPNYSHSTDKRIIEIYQVPKVDEKGFWMIPMSVAFRKKFGSIKIRMPKNLRNKKISYIEIVPKQKGRFFEVHYTYEMHVSQMKQQSTTTSNALSCDLGVDRLVSCVTNTGDAFLIDGKKLKSINQYFNKMICNLQQKNMDNGISKRIVTNKMAALWHKRERQINGYIAQTVGLLFKKVKEFDIDTIVVGYNAGWKQNSHMGKKNNQKFVQIPFHKLIAAIENKCIKEGIRFFKQEESYTSKASFLDKDPVPVWSKDNRAQYYFSGKRITRGLCQSKAGTCIHADINGALNTLQKSQVVEFDCNLKVKTPILLEVQKRKAVAARIA

SEQ ID NO: 5426 - protein, 451 aa, unidentified
MAKKKAVKVLWKQKKSETLRRFTQKQNIGRACLTAQEFRLLQRMSHSSKALRNVGLYTMKQSYLNHNKMATVKEVDTAMQADMNYWGIQSNSVQAIRRALFTEVKSFFKALEQWKENPEKFTGRPKFPNYSHSTDKRIIEIYQVPKVDENGFWMIPMSVAFRKKFGSIKIRMPKNLRNKNISYIEIVPKQKGRFFEVHYTYEMHVSQMKKQPMTTSNALGCDLGVDRLVSCVTNTGDAFLIDGKKLKSINQYFNKTIRNLQQKNVENGLSKRIVTNKIAALWHKRERQIHGYIAQTVGLLFKKVKEFDIDTIVVGYNAGWKQNSHMGKKNNQKFVQIPFHKLIAAIENKCIKEGIRFFKQEESYTSKASFLDKDPVPVWSKDDRTQYRFSGKRITRGLYQSKAGTCIHADINGALNTLQKSQVVELDGNLKVKTPILLEVQKREAVASRIA

SEQ ID NO: 5427 - protein, 451 aa, unidentified
MARKKAVKVLRKQKKRETMQRFTQKQHIGRACLTAKEFRLLQRMSHSSKALRNVGLYTIKQSYLNDNKMATVKEVDNAMQADMNYSGVQSNSVQAIRRALFTEVKSFFKAMEQWKKHPEKFTDRPKFPNYSRSTDKRIIEIYQVPKVDENGYWIIPMNVAFRQKFGSIKIRMPKNLINKKISYIEIVPKQKGRFFEVHYTYEVHVSQMKKPSTTTSNALGCDLGVDRLVSCVTNTGDTFLIDGKKLKSINQYFNKMIGNLQQKNMKNGLSKRVVTNKIAAIWHKRDRQINGYIAQTVGLLFKKVKEFDIDTIVVGYNAGWKQKSHMGKKNNQTFVQIPFHKLMAAIENKCVKEGIRFLKQEESYTSKASFLDKDPVPVCSKDDRTQYRFSGKRITRGLYQSKAGTCIHADINGALNTLKKSKVVELDDNLKVKTPILLEVQKRKAVASRIA

SEQ ID NO: 5428 - protein, 451 aa, unidentified
MARKKVVKVLRKQKKRETMQRFTQKQNIGRACLTAKEFRLLQRMAHSSKALRNVGLYTIKQSYLNDNKMATVKEVDNAMQADMNYSGVQSNSVQAICRALFTEMKSFFKALEQWKKHPDKFTGRPKFPNYSRSTDKRIIEIYQVPKVDENGYWMVPMNVAFRKKFGSIKIRMPKNLRNKNISYIEIVPKQKGRFFEVHYTYEMHVSQVKKQPTTTSNALSCDLGVDRLVSCVTNTGYAFLIDGKKLKSINQYFNKTIRNLQLKNMENGLSKRLVTNKIAALWHKRERQINGYIAQTVGLLFKKVKEFDIDTIVVGYNAGWKQKSHMGKKNNQTFVQIPFEKLMAAIENKCIKEGIRFFKQEESYTSKASFLDKDPVPVWSKDDKTQYRFSGKRITRGLYQSKAGTCIHADINGALNTLKKSKIVELDDNLKVKTPILLEVQKRKAIASRIA

SEQ ID NO: 5429 - protein, 451 aa, unidentified
MARKKAVKVLRKQKKRETMQRFTQKQHIGRACLTAKEFRLLQRMSHSSKALRNVGLYTIKQSYLNDNKMATVKEVDNAMQADMNYSGVQSNSVQAIRRALFTEVKSFFKAMEQWKKHPEKFTDRPKFPNYSRSTDKRIIEIYQVPKVDENGYWIIPMNVAFRQKFGSIKIRMPKNLINKKISYIEIVPKQKGRFFEVHYTYEVRVSQMKKPSTTTSNALGCDLGVDRLVSCVTNTGDTFLIDGKKLKSINQYFNKMIGNLQQKNMKNGLSKRVVTNKIAAIWHKRDRQINGYIAQTVGLLFKKVKEFDIDTIVVGYNAGWKQKSHMGKKNNQTFVQIPFHKLMAAIENKCVKEGIRFLKQEESYTSKASFLDKDPVPVWSKDDRTQYRFSGKRITRGLYQSKAGTCIHADINGALNTLKKSKVVELDDNLKVKTPILLEVQKRKAVASRIA

SEQ ID NO: 5430 - protein, 451 aa, unidentified
MARKKVVKVLRKQKKRETMQRFTQKQNIGRACLTAKEFRLLQRMAHSSKALRNVGLYTIKQSYLNDNKMATVKEVDNAMQADMNYSGVQSNSVQAIRRALFTEMKSFFKALEQWKKHPDKFTGRPKFPNYSRSTDKRIIEIYQVPKVDENGYWMVPMNVAFRKKFGSIKIRMPKNLRNKNISYIEIVPKQKGRFFEVHYTYEMHVSQVKKQPTTTSNALSCDLGVDRLVSCVTNTGYAFLIDGKKLKSINQYFNKTIRNLQLKNMENGLSKRLVTNKIAALWHKRERQINGYIAQTVGLLFKKVKEFDIDTIVVGYNAGWKQKSHMGKKNNQTFVQIPFEKLMAAIENKCIKGGIRFFKQEESYTSKASFLDKDPVPVWSKDDKTQYRFSGKRITRGLYQSKAGTCIHADINGALNTLKKSKIVELDDNLKGKTPILLEVQKRKAIASRIA

SEQ ID NO: 5431 - protein, 440 aa, unidentified
MDRKKAVKVLRKQKKRETMQRFTQKQNIGRACLTAKEFRLLRRMSHSSKALRNVGLYTMKQSYLNDNKMATVKEVDTAMQADMNYWGMQSNSVQAIRRSLFTEVKSFFKAMEQWKKNPEKFTGRPKFPNYSRSTDKRIIEIYQVPKVDESGYWIIPMNIAFRKKFGSIKIRMPKNLRHKKISYIEIVPKQKGRFFEVHYTYEMHISQMKKPSTTTSNALSCDLGVDRLVSCVTNTGDAFLIDGKKLKSINQYFNKVIRNLQLKNVENGLSKRIVTNKMAVLWHKRERQINSYISQAVGLLFKKVKEFDIDTIVVGYNTGWKQKSDIGKKNNQKFVQIPFQKLIAAIENKCIKEGIRFLKQEESYTSKASFLDKDPVPVWSKDDKMQYLFSGKRITRGLYQSKAGTCIHADINGALNTLQKSRVVELDENLKVRTPILLEV

SEQ ID NO: 5432 - protein, 451 aa, unidentified
MAKKKAVKVLRKQKKRETIQRFTQKQNIGRACLTAKEFRLLQRMSHSSKALRNVGLYTIKQSYLNNNKMANVKEVDTAMQADMNYSGVQSNSVQAIRRALFTEVKSFFKALEQWKKKPETFTGRPKFPNYSRSTDKRIIEIYQVPKVDDNGYWMIPMNVAFRKKFGSIKIRMPKNLRNKKISYIEIVPKQKGRFFEVHYTYEMHVSQMKKPPTTTSNALSCDLGVDRLVSCVTNTGDTFLIDGKKLKSINQYFNKMIRNLQQKNMENGISKRIVTNKIAALWHKRERQINGYISQTVGLLFKKVKAFDIDTIVVGYNTGWKQKSDMGKKNNQKFVQIPFHKLIAAIENKCVKEGIRFLKQEESYTSKASFLDKDRVPVWSKDDRTQYRFSGKRTTRGLYQSKAGTCIHADINGALNTLQKSKVVELDDNLKVKTPILLEVQKRKAVASRIA

SEQ ID NO: 5433 - protein, 451 aa, unidentified
MAKKKAVKVLRKQKKRETLRRFTQKQNIGRACLTAQEFRLLQRMSHSSKALRNVGLYTMKQSYLNYNKMATVKEVDTAMQADMNYWGIQSNSVQAIRRALFTEVKSFFKALEQWKKNPKKFTGRPKFPNYSHSTDKRIIEIYQVPKVDENGFWMIPMSVAFRKKFGSIKIRMPKNLRNKNISYIEIVPKQKGRFFEVHYTYEMHVSQMKKQPMTTSNALGCDLGVDRLVSCVTNTGDAFLIDGKKLKSINQYFNKTIRNLQQKNVENGLSKRIVTNKIAALWHKRERQIHGYIAQTVGLLFKKVKEFDIDTIVVGYNAGWKQNSHMGKKNNQKFVQIPFHKLIAAIENKCIKEGIRFFKQEESYTSKASFLDKDPVPVWSKDDRTQYRFSGKRITRGLYQSKAGTCIHADINGALNTLQKSQVVELDGNLKVKTPILLEVQKRKAVASRIA

SEQ ID NO: 5434 - protein, 451 aa, unidentified
MARKKAVKVLRKQKKRENMQRFTQKQNIGRACLTAKEFRLLQRMSHSSKALRNVGLYTIKQSYLNNNKIATVKEVDTAMQADMNYWGIQSNSVQAIRRALFTEVKSFFKALEQWKKKPEKFTGRPKFPNYSRSTDKRIIEIYQVPKVDENGYWMIPMNVAFRKKFGSIKIRMPKNLRNKKISYIEIVPKQKGRFFEVHYTYDMHVSQMKQQSTTTSNALSCDLGVDRLVSCVTNTGDTFLIDGKKLKSINQYFNKMIHNLQQKNVDNGISKRIVTNRMAALWHKRERQINGYISQTVGLLFKKVKACNIDTVVVGYNASWKQKSDMGKKNNQTFVQIPFHKLIAAIENKCIKEGIRFFKQEESYTSKASFLDKDPVPVWSKDDRTHYRFSGKRITRGLYQSKSGRCIHSDINGALNTLEKSRVVELDESLKVKTPILLEVQKRKAVASRIA

SEQ ID NO: 5435 - protein, 451 aa, unidentified
MARKKAVKVLRKQKKRETMQRFTQKQHIGRACLTAKEFRLLQRMSHSSKALRNVGLYTIKQSYLNDNKMATVKEVDNAMQADMNYSGVQSNSVQAIRRALFTEVKSFFKAMEQWKKHPEKFTDRPKFPNYSRSTDKRIIEIYQVPKVDENGYWIIPMNVAFRQKFGSIKIRMPKNLINKKISYIEIVPKQKGRFFEVHYTYEVHVSQMKKPSTTTSNALGCDLGVDRLVSCVTNTGDTFLIDGKKLKSINQYFNKMIGNLQQKNMKNGLSKRVVTNKIAAIWHKRDRQINGYIAQTVGLLFKKVKEFDIDTIVVGYNAGWKQKSHMGKKNNQTFVQIPFHKLMAAIENKCVKEGIRFLKQEESYTSKASFLDKDPVPVWSKDDRTQYRFSGKRITRGLYQSKAGTCIHADINGALNTLKKSKVVELDDNLKVKTPILLEVQKRKAVASRIA

SEQ ID NO: 5436 - protein, 451 aa, unidentified
MARKKAVKVLRKQKKRETMQRFTQKQHIGRACLTAKEFRLLQRMSHSSKALRNVGLYTIKQSYLNDNKMATVKEVDNAMQADMNYSGVQSNSVQAIRRALFTEVKSFFKAMEQWKKNPEKFTGRPKFPNYSRSTDKRIIEIYQVPKVDENGYWMIPMNVAFRQKFGSIKIRMPKNLRNKKISYIEIVPKQKGRFFEVHYIYEVHISQMKKPSTTTSNALGCDLGVDRLVSCVTNTGDAFLIDGKKLKSINQYFNKMICNLQQKNMKNGLSKRVVTNKIAALWHKRDRQINGYIAQTVGLLFKKVKEFDIDTIVVGYNAGWKQKSHMGKKNNQTFVQIPFHKLMAAIENKCVKEGIRFLKQEESYTSKASFLDKDPVPVWSKDDRTQYRFSGKRITRGLYQSKAGTCIHADINGALNTLKKSKVVELDDNLKVKTPILLEVQKRKAVASRIA

SEQ ID NO: 5437 - protein, 451 aa, unidentified
MARKKAVKVLRKQKKRENMQRFTQKQNIGRACLTAKEFRLLQRMSHSSKALRNVGLYTIKQSYLNDNKMATIKEVDTAMQADTNYWGMQSNSVQAIRRTLFTEVKSFFKALEQWKKNPEKFTGRPKFPNYSRSTDKRIVEIYQVPKVDDNGYWMIPMNVAFRKKFGSIKIRMPKNLKNKKISYIEIVPKQKGRFFEVHYTYEMHVSQMKKPSTTTSNALSCDLGVDRLVSCVTNTGDAFLIDGKKLKSINQYFNKMICNLGQKNMDNGISKRIVTNKMAALWHKRERQINGYIAQTVGLLFKKVKEFDIDTIVIGYNAGWKQNSHIGKKNNQKFVQIPFQKLMAAIENKCIKEGIRFFKQEESYTSKASFIDKDPVPVWSKDDKTQYRFSGKRITRGLYQSKAGTCIHADINGALNTLQKSRVVQLDDNLKVKTPILLEVQKRKAVASRIA

SEQ ID NO: 5438 - protein, 451 aa, unidentified
MARKKAVKVLRKQKKRETMQRFTQKQNIGRACLTAKEFRLLQRMSHSSKALRNVGLYTMKQSYLNHNRMATVKEVDTAMQADMNYSGVQSNSVQAIRRALFTEVKSFFKALEQWKKNPEKFTGRPKFPNYSRSTDKRIIEIYQVPKVDENGYWIIPMNVAFRKKFGSIKIRMPKNLRNKNISYIEIVPKQKGRFFEVHYTYEMHVSQMKKQPTTTSNALSCDLGVDRLVSCVTHTGDAFLIDGKKLKSINQYFNKMICNLQQKNMDNGISKRIVTNKMAALWHKRERQINGYIAQTVGLLFKKVKEFDIDTIVVGYNAGWKQNSHMGKKNNQKFVQIPFQKLIAAIENKCVKEGIRFFKQEESYTSKASFLDKDPVPVWSKDDKTQYRFSGKRITRGLYQSKAGTCIHADMNGALNILKKSGVVELDENLKVKTPILLEVQKRKAIASRIA

SEQ ID NO: 5439 - protein, 394 aa, unidentified
MIAVRRQVLKRTDKRFNELDNICFLSKNLYNATLYEMRQSYFKTKMYLKYETINKKFTPENQVDYRALPAKVSKMTQMLAEQGFKSYREKKKKGDAKARLPKYLVKDGRQVVNYTKQALSFKKKGCVKLSRTEIYIEIGELDVNFVRITPRGNHIIVEIGYEIEEKEIQNNERYASIDLGINNLATITSNVFKPFIINGRALKGINQYYNKNLAIQKSKLEKINLKTSKKVKNLHIKRNNKINDCLHKATRLLVNYLVSKQISILIIGYNKGWKQNTDMGTENNQKFYNIPFYKFKKMLKYKCKVEGITLIEQEERYTSQASFLDKEKVSKKINFMGKRIKRGLFETKNKILINADVNASYNILKKYLTKKGVWNEKIFSDCIEVYSTPLLRNF

SEQ ID NO: 5440 - protein, 394 aa, unidentified
MIAVRRQVLKRTDKRFNELDNICFLSKNLYNATLYEMRQSYFKTKTYLKYETINKKFTHENQVDYRALPAKVSKMTQMLAEQGFKSYREKKKKGDAKARLPKYLVKDGRQVVNYTKQALSFKKKGCVKLSGTEIYIEIGELDVNFVRITPRGNHIIVEIGYEIEEKEIQNNERYASIDLGINNLATITSNVFKPFIINGRALKGINQYYNKNLAIQKSKLEKINLKTSKKVKNLHIKRNNKINDCLHKATRLLVNYLVSKQISILIIGYNKGWKQNTDMGTENNQKFYNIPFYKFKKMLKYKCKVEGITLIEQEERYTSQASFLDKEKVSKKINFMGKRIKRGLFETKNKILINADVNASYNILKKYLTKKGVWNEKIFSDCIEVYSTPLLRNF

SEQ ID NO: 5441 - protein, 451 aa, unidentified
MARKKAVKVLRKQKKRENIQRFTQKQNIGRACLTAKEFRLLQRMSHSSKALRNVGLYTIKQSYLNNNKMATVKEVDTAMQADMNYWGIQSNSVQAIRRSLFTEVKSFFKGLEQWKKKPETFAGRPKFPNYSGSTDKRIIEIYQVPKVDDNGYWMIPMNVAFRKKFGSIKIRMPKNVRNKKISYIEIVPKQKGRFFEVHYTYEMHVSQMKKPSTTTSNALSCDLGVDRLLSCVTNTGDAFLIDGKKLKSINQYFNKMIRNLQLKNVENGLSKRVVTNKMAALWHKRERQINGYISQTVGLLFKKVKACNIDMVVVGYNTGWKQKSDMGKKNNQKFVQIPFHKLIAAIENKCIKEGIRFLKQEESYTSKASFLDKDKIPVWSKEDRTHYRFSGKRITLGLYQSKSGTCIHADINGALNTLQKSRVVELDENLKVKTPILLEVQKRKAVASRIA

SEQ ID NO: 5442 - protein, 451 aa, unidentified
MARKKAVKVLRKQKKRENMQRFTQKQNIGRACLTAKEFRLLQRMSHSSKALRNVGLYTIKQSYLNNNKMATVKEVDTAMQTDMNYWGIQSNSVQAIRRALFTEVKSFFKALEQWKKKPETFAGRPKFPNYSGPTDKRIIEIYQVPKVDDNGYWLIPMNVAFRKKFGSIKIRMPKNVRNKKISYIEIVPKQKGRFFEVHYTYEMHVSQMKKQSTTTSNALSCDLGVDRLLSCVTNTGDTFLIDGKKLKSINQYFNKMIRNLQQKNMDNGISKRIVTNKMAALWHKRERQINGYISQTVGLLFKKVKACNIDTVVVGYNTGWKQKSDMGKKNNQKFGQIPFHKLIAAIENKCVKEGIRFLKQEESYTSKASFLDKDRVPVWDKDDRTHYRFSGKRITRGLYQSKAGTCIHADINGALNTLKKSRVVQLDENLKVKTPILLEVQKRKAVASCIA

SEQ ID NO: 5443 - protein, 451 aa, unidentified
MARKKAVKVLSKQKKRENIQRFTQKQNIGRACLTAKEFRLLQRMSHSSKALRNVGLYTIKQSYLNNNKMATVKEVDTAMQADMNYWGIQSNSVQAIRRSLFTEVKSFFKGLEQWKKKPKTFAGRPKFPNYSGSTDKRIIEIYQVPKVDDNGYWMIPMNVAFRKKFGSIKIRMPKNVRNKKISYIEIVPKQKGRFFEVHYTYEMHVSQMKKPSTTTSNALSCDLGVDRLLSCVTNTGDAFLIDGKKLKSINQYFNKMIRNLQLKNVENGLSKRVVTNKMAALWHKRERQINGYISQTVGLLFKKVKACNIDMVVVGYNTGWKQKSDMGKKNNQKFVQIPFHKLIAAIENKCIKEGIRFLKQEESYTSKASFLDKDKIPVWSKEDRTHYRFSGKRITRGLYQSKSGTCIHADINGALNTLQKSRVVELDENLKVKTPILLEVQKRKAVASRIA

SEQ ID NO: 5444 - protein, 451 aa, unidentified
MVKKKAVKVLRKQKKRENIQRFTQKQNIGRACLTAKEFRLLQRMSHSSKALRNVGLYTIKQSYLNHNKMATVKEVDNAMQADMNYWGIQSNSVQAIRRALFTEVKSFFKAWEQWKKNPETFTGRPKFPNYSRSTDKRIIEIYQVPKVDDNGYWMIPMNVAFRKKFGSIKIRMPKNLRNKKISYIEIVPKQKGRFFEVHYTYEMHVSQMKQQSTTTSNALSCDLGVDRLLSCVTNTGDTFLIDGKKLKSINQYFNKKIRNLQQKNIENGISKRVVTNRMAALWHKRERQVNGYISQTVGLLFKKVKAFDIDTIVVGYNTGWKQKSDMGKKNNQKFVQIPFHKLIAAIENKCIKEGIRFLKQEESYTSKASFLDKDPIPVWSKDDRAHYRFSGRRITRGLYQSKAGTCIHADINGALNTLEKSRVVELDDNPKVKTPILLEVQKRKAVASRIA

SEQ ID NO: 5445 - protein, 451 aa, unidentified
MARKKAVKVLRKQKKRENIQRFTQKQNIGRACLTAKEFRLLQRMSHSSKALRNVGLYTIKQSYLNDNKMATVKEVDTAMQADMNYSGIQSNSVQAIRRALFAEVKSFFKALEQWKKKPKTFTGRPKFPNYSRSTDKRIIEIYQVPKLDDNGYWMIPMNVAFRKKFGSIKIRMPKNVRNKKISYIEIVPKQKGRFFEVHYTYEMHVSQMKKQSTTTSNALSCDLGVDRLVSCATNTGDAFLIDGKKLKSINQYFNKMIRNLQLKNMENGLSKRVVTNQMAALWHKRERQINGYISQTVGLLFKKVKACNIDTVVVGYNAGWKQKSDMGKKNNQKFIQIPFHKLIAAIKNKCVKEGIRFFKQEESYTSKASFIDKDPIPVWSKDDRTHYRFSGKRMTRGLYQSKAGTCIHADINGALNTLQKSRVVELDENLKVKTPILLEVQKRKAVASRIA

SEQ ID NO: 5446 - protein, 420 aa, unidentified
MQELVGPTKPRIKKEYQIERHIIKHTHPKFSVLDEVTFLSKNLYNATLYAVRQQFFADGSFLEYAKVNKQFTHDRQADYIALPAKVAKHTQQLVDQAYRSFFGLLKTKQQHPKINAKLPKYLDKTKGRQVVHYEKGALSFKKPGFIKLSGLNFYIKTKLIKKQVAFVRLVPKGNHITVEIGYEHEIPKPKDKAGRIAGLDVGLNNLATLTSNVATPMIVNGRPLKSINQFYNKHKAVEDSKLDTGQKTSKARKQQLGLVRKNKIADYLHKSSRHVVNYLVANNIDTLVIGKNIGWKQDINIGKRNNQNFVAIPFTNFIKQVMYKAHNVGVEVIYQEESYTSKCSFFDNEAIQKHDNYAGCRVHRGLFKTASGKKVNADVNGSLNIIKKHLITQEAWNDQLRLDLVEASSTPNIPKFTPDC

SEQ ID NO: 5447 - protein, 451 aa, unidentified
MSKSDKQVKQPKVPKIKYFLAKRPKSDFVGPMQELVGPTKPRIKKEYQIERHIIKHTHPKFSVLDEVTFLSKNLYNATLYAVRQQFFADGSFLEYAKVNKQFTHDRQADYIALPAKVAKHTQQLVDQAYRSFFGLLKTKQQHPKINAKLPKYLDKTKGRQVVHYEKGALSFKKPGFIKLSGLNFYIKTKLIKKQVAFVRLVPKGNHITVEIGYEHEIPKPKDKAGRIAGLDVGLNNLATLTSNVATPMIVNGRPLKSINQFYNKHKAVEDSKLDTGQKTSKARKQQLGLVRKNKIADYLHKSSRHVVNYLVANNIDTLVIGKNIGWKQDINIGKRNNQNFVAIPFTNFIKQVMYKAHNVGVEVIYQEESYTSKCSFFDNEAIQKHDNYAGCRVHRGLFKTASGKKVNADVNGSLNIIKKHLITQEAWNDQLRLDLVEASSTPNIPKFTPDC

SEQ ID NO: 5448 - protein, 451 aa, unidentified
MAKKKAVKVLRKQKKRETLRRFTQKQNIGRVCLTAQEFRLLQRMSHSSKALRNVGLYTMKQSYLNDNKMATVKEVDTAMQADTNYWGVQSNSVQAIRRALFTEVKSFFKALEQWKKNPEKFTGRPKFPNYSHSTDKRIIEIYQVPKVDENGFWIIPMSVAFRKKFGSIKIRMPKNLRNKKISYIEIVPKQKGRFFEVHYTYEMHVSQMKQQSTTTSNALSCDLGVDRLVSCVTNTGDAFLIDGKKLKSINQYFNKMICNLGQKNMDNGISKRIVTNKMAALWHKRERQINGYIAQTVGLLFKKVKEFDIDTIVVGYNAGWKQNSHMGKKNNQKFVQIPFHKLIAAIENKCIKEGIRFFKQEESYTSKASFLDKDPVPVWSKDDKTQYRFSGKRMTRGLYQSKAGTCIHADINGALNTLQKSQVVELDGNLKVKTLILLEVQKRKAVASRIA

SEQ ID NO: 5449 - protein, 451 aa, unidentified
MAKKKAVKVLRKQKKRETLRRFTQKQNIGRACLTAQEFRLLQRMSHSSKALRNVGLYTMKQSYLNHNKMATVKEVDIAMQADMNYWGIQSNSLQAIRRALFTEVKSFFKALEQWKKNPEKFTGRPKFPNYSHSTDKRIIEIYQVPKVDENGFWMIPMSVAFRKKFGSIKIRMPKNLRNKNISYIEIVPKQKGRFFEVHYTYEMHVSQMKKQPMTTSNALGCDLGVDRLVSCVTNTGDAFLIDGKKLKSINQYFNKTIRNLQQKNVENGLSKRIVTNKIAALWHKRERQIHGYIAQTVGLLFKKVKEFDIDTIVVGYNAGWKQNSHMGKKNNQKFVQIPFHKLIAAIENKCIKEGIRFFKQEESYTSKASFLDKDPVPVWSKDDRTQYRFSGKRITRGLYQSKAGTCIHADINGALNTLQKSQVVELDGNLKVKTPILLEVQKRKAVASRIA

SEQ ID NO: 5450 - protein, 451 aa, unidentified
MTRKKAVKVLRKQKKRETMQRFTQKQNIGRACLTAKEFRLLQRMSHSSKALRNVGLYTIKQSYLNHNKMATVKEVDNAMQADMNYWGIQSNSVQAIRRALYADVKSFFKAMEQWKKKPETFTGRPKFPNYSRSTDKRIIEIYQVPKVDDNGYWMIPMNVAFRKKFGSIKICMPKNLRHKKISYIEIVPKQKGRFFEVHYTYEMYVSQMKKQPTTTSNALSCDLGVDRLVSYVTNTGDAFLIDGKKLKSINQYFNKMIRNLQQKNIENGLSKRVVTNKMAALWHKRERQINGYISQTVGLLFKKVKAFGIDTVVVGYNAGWKQKSDMGKKNNQTFVQIPLHKLLAAIENKCVKEGIRFLKQEESYTSKASFLDKDPVPVWSKDDRMHYRFSGKRITRGLYQSKAGTCIHADINGALNTLQKSKVVELDDNLKVKTPILLEVQKRKAVASRIA

SEQ ID NO: 5451 - protein, 451 aa, unidentified
MARKKAVKVLRKQKKREIIQRFTQKQNIGRACLTAKEFRLLQRMSHSSKALRNVGLYTIKQSYLNHNKMATIREVDTAMQADMNYWGIQSNSVQAIRRALFTEVKSFFKALEQWKKKTEQFTGRPKFPNYSRSTDKRIIEIYQVPKVDENGYWMIPMNVAFRKKFGSIKIRMPKNLRNKNISYIEIVPKQKGRFFEVHYTYEMHVSQMKKPPTTTSNALSCDLGVDRLLSCVTNTGDAFLMDGKKLKSINQYFNKMICNLGQKNMDNGISKRIVTNKMAALWHKRERQINGYIAQTVGLLFKKVKEFDIDTIVVGYNAGWKQNSHMGKKNNQKFVQIPFQKLIAAIENKCVKEGIRFFKQEESYTSKASFLDKDPVPVWSKDDKTQYRFSGKRITRGLYQSNAGTCIHADINGALNTLKKSGVVELDGNLKVKTPILLEVQKRKAIALCIA

SEQ ID NO: 5452 - protein, 400 aa, unidentified
MKLVERHIISQNHPLWSEIDHYAFLSKNLFNLANYHYRQYFFENSQKLSFNQLYHLVSKTSDYLALPTKVSKQIIRRLDQAWISYFAAFRAWKKHPEKFLGKPKIIKYKDKTKGRNLLIYSQESIYKKPLKEGICHLSMSDVKLTTSRREIIEVRIVPKSSCYVIEIVYERRSETTDKQEIAGIDLGVNNLMAVTTNQTGVAPLLVNGRPLKAINTFYNKQRSRLQSQLKTRNNQPSSKRLIFLTHKRNCRVENYLHTASKRVIDWCIIHQIGTLIIGHNERIKQCLNLGKRNNQQFVNIPHYRLIEMLTYKAQLKGIKVIITEESYTSQSSALDRDELPKYGEEKPLFKGKRLARGLYKMGTNQLLNADVNGSFNIIRKVIPDVIDQGIKGLPFNPLRA

SEQ ID NO: 5453 - protein, 409 aa, unidentified
MTLTERHIIKPTHPIFKRIKDFCHLSKNLYNYANFILREHYFAGFKLPTAYDLINRFVKESQRDYKALPAQSAQQVLMLLSQNWKSYLKALKAYKLKPSSFLARPKIPKFKPKDGVSIGVLTNQQTSFTKGRMTKIKFPKKANLKRLITKINPQTSRLKQVRLIPKTTCFIVEVVYEQTTHKLPQTHGIGIMGIDLGLNNFVTAIDNQSSPFIIKGGGVKSVNQWFNKLKAHYQAKAKTSNKRFWTKRLGKLALWRECKVNDFMHKASAYVVGHCLKKGISTIVIGKNDGWKQELKLGKRTNQNFTNIPYESFIEKLAYKCALVGITLHTTEERFTSKCDHLANEPMQHHEQYLGKRVKRGLFKSSIGKSLNADINGAIGILRKVFPDAVKTLRDSGVVFTPVKISLAF

SEQ ID NO: 5454 - protein, 474 aa, unidentified
MFRFVPNIDLSKVMNSLRKVVKTMARKKAVKVLRKQKKRENMQRFTQKQNIGRACLTAKEFRLLQRMSHSSKALRNVGLYTIKQSYLNHNKMATVKEVDTAMQADTNYWGMQSNSVQAIRRALFTEVKSFFKAMEQWKKNPEKFTGRPKFPNYSRSTDKRIIEIYQVPKVDDNGYWMIPMNVAFRKKFGSIKIRMPKNVRNKKISYIEIVPKQKGRFFEVHYTYEMHVSQMKKQSTTTSNALSCDLGVDRLLSCATNTGDAFLIDGKKLKSINQYFNKMIRNLQQKNMDTGISKRIVTNKMAALWHKRERQINGYISQTVGLLFKKVKACNIDTVVVGYNAGWKQKSDMGKKNNQTFVQIPFHKLLAAIENKCVKEGIRFLKQEESYTSKASFLDKDRVPVWSKDDRSHYRFSGKRITRGLYQSKAGKCIHADINGALNTLQKSRVVELDDNLKVKTPILLEVQKRKAVASRIA

SEQ ID NO: 5455 - protein, 451 aa, unidentified
MARKKAVKVLRKQKKRENIQRFTQKQNIGRACLTAKEFRLLQRMSHSSKALRNVGLYTIKQSYLNNNKMATVKEVDTAMQADMNYWGIQSNSVQAIRRSLFTEVKSFFKGLEQWKKKPETFAGRPKFPNYSGSTDKRIIEIYQVPKVDDNGYWMIPMNVAFRKKFGSIKIRMPKNVRNKKISYIEIVPKQKGRFFEVHYTYEMHVSQMKKPSTTTSNALSCDLGVDRLLSCVTNTGDAFLIDGKKLKSVNQYFNKMIRNLQLKNVENGLSKRVVTNKMAALWHKRERQINGYISQTVGLLFKKVKACNIDMVVVGYNTGWKQKSDMGKKNNQKFVQIPFHKLIAAIENKCIKEGIRFLKQEESYTSKASFLDKDKIPVWSKEDRTHYRFSGKRITRGLYQSKSGTCIHADINGALNTLQKSRVVELDENLKVKTPILLEVQKRKAVASRIA

SEQ ID NO: 5456 - protein, 451 aa, unidentified
MTKKRAVKVLRKQKKRENMQRFTQKQNIGRACLTAKEFRLLQRMSHSSKALRNVGLYTIKQSYLNNNKMATVKEVDTAMQTDMNYWGIQSNSVQAIRRALFTEVKSFFKAMEQWKKKPETFTGRPKFPNYSRSTDKRIIEIYQVPKVDNNGYWMIPMNVAFRKKFGSIKIRMPKNLRNKKISYIEIVPKQKGRFFEVHYTYEMHVSQMKKQPTTISKALSCDLGVDRLLSCVTNTGDAFLIDGKKLKSINQYFNKMIRNLQLKNMENGLSKRVVTNKMAALWHKRERQINGYISQTVGLLFEKVKAFNIDTVVVGYNAGWKQKSDMGKKNNQKFVQIPFHKLIAAIENKCVKEGIRFLKQEESYTSKASFLDKDRVPVWSKEDRMHYRFSGKRITRGLYQSKAGKCIHADINGALNTLEKSRVVELDDNLKVKTPILLEVQKRKAVASCIA

SEQ ID NO: 5457 - protein, 451 aa, unidentified
MVKKKAVKVLRKQKKRENIQRFTQKQNIGRACLTAKEFRLLQRMSHSSKALRNVGLYTIKQSYLNHNKMATVKEVDNAMQADMNYWGIQSNSVQAIRRALFTEVKSFFKAWEQWKKNPETFTGRPKFPNYSRSTDKRIIEIYQVPKVDDNGYWMIPMNVAFRKKFGSIKIRMPKNLRNKKISYIEIVPKQKGRFFEVHYTYEMHVSQMKKPSTTTSNALSCDLGVDRLLSCVTNTGDTFLIDGKKLKSINQYFNKKIRNLQQKNIENGISKRVVTNRMAALWHKRERQVNGYISQTVGLLFKKVKAFDIDTIVVGYNTGWKQKSDMGKKNNQKFVQIPFHKLIAAIENKCIKEGIRFLKQEESYTSKASFLDKDPIPVWSKDDRAHYRFSGRRITRGLYQSKAGTCIHADINGALNTLEKSRVVELDDNLKVKTPILLEVQKRKAVASRIA

SEQ ID NO: 5458 - protein, 451 aa, unidentified
MARKKAVKVLRKQKKRETMQRFTQKQNIGRACLTAKEFRLLQRMSHSSKALRNVGLYTIKQSYLNHNKVATVKEVDTAMQADMNYWGVQSNSVQAIRRALFTEVKSFFKALEQWKKKPETFTGRPKFPNYSRSTDKRVIEIYQVPKVDDNGYWMIPMSIAFRKKFGSIKIRMPKNLRNKKISYIEIVPKQKGRFFEVHYTYEMHVSQMKKPPTTTSNALSCDLGVDRLVSCVTNTGDAFLIDGKKLKSINQYFNKMIGNLGRKNMDNGISKRIVTNKMAALWHKRERQINGYIAQTVGLLFKKVKEFDIDTIVVGYNAGWKQNSHMGKKNNQKFVQIPFHKLIAAIENKCIKEGIRFFKQEESYTSKASFLDKDKVPVWSKDDKTHYRFSGKRITRGLYQSKAGTCIHADINGALNTLEKSKVVELDENFKVKTPILLEVQKRKAVASRIA

SEQ ID NO: 5459 - protein, 451 aa, unidentified
MARKKAVKVLRKQKKRETMQRFTQKQNIGRACLTAKEFRLLQRMSHSSKALRNVGLYTMKQSYLNHNRMATVKEVDTAMQNDMNYSGIQSNSVQAIRRALFTEGKSFFKALEQWKKNPEKFTGRPKFPNYSRSTDKRIIEIYQAPKVDENGYWMIPMNVAFRKKFGSIKIRMPKNLRNKNISYIEIVPKQKGRFFEVHYTYEMHVSQMKKLSTTTSNALSCDLGVDRLVSCVTNTGDAFLIDGKKLKSINQYFNKMICNLQQKNMDNGIAKRIVTNKIAALWHKRERQINGYIAQTVGLLFKKVKEFDIDTIVIGYNAGWKQKSHMGKKNNQKFVQIPFQKLIAAIENKCVKEGIRFFKQEESYTSKASFLDKDPVPVWSKDDKTQYRFSGKRITRGLYQSKAGTCIHADINGALNILKKSGVVELDDNLKVKTPILLEVKKRKAVTSRIA

SEQ ID NO: 5460 - protein, 451 aa, unidentified
MARKKAVKVLRKQKKRENIQRFTQKQNIGRACLTAKEFRLLQRMSHSSKALRNVGLYTIKQSYLNNNKMATVKELDTAMQADMNYWGIQSNSVQAIRRSLFTEVKSFFKGLEQWKKKPETFAGRPKFPNYSGSTDKRIIEIYQVPKVDDNGYWMIPMNVAFRKKFGSIKIRMPKNVRNKKISYIEIVPKQKGRFFEVHYTYEMHVSQMKKPSTTTSNALSCDLGVDRLLSCVTNTGDAFLIDGKKLKSINQYFNKMIRNLQLKNVENGLSKRVVTNKMAALWHKRERQINGYISQTVGLLFKKVKACNIDMVVVGYNTGWKQKSDMGKKNNQKFVQIPFHKLIAAIENKCIKEGIRFLKQEESYTSKASFLDKDKIPVWSKEDRTHYRFSGKRITRGLYQSKSGTCIHADINGALNTLEKSKIVQLDDNLKVKTPILLKVQKRRAFASRIA

SEQ ID NO: 5461 - protein, 451 aa, unidentified
MARKKAVKVLRKQKKRETMQRFTQKQHIGRACLTAKKFRLLQRMSHSSKALRNVGLYTMKQSYLNDNKMATVKEVDNAMQADMNYWGVQSNSVQAIRRALFTEVKSFFKALEQWKKNPEKFTGRPKFPNYSRSTDKRIIEIYQVPKVDDNGYWIIPMNVAFRKKFGSIKIRIPKNLRNKKISYIEIVPKQKGRFFEVHYTYEMHVSQMKKPSTTTSNALSCDLGVDRLVSCVTNTGDAFLIDGKKIKSINQYFNKTIRNLQQKNMENGISKRVVTNKIAALWHKRERQINGYISQTIGLLFKKVKAYNIDTIVVGYNTDWKQKSDMGKKNNQTFVQIPFHKLIAAIENKCIKEGIRFLKQEESYTSKASFLDKDPIPVWSKDDRTQYGFSGKRITRGLYQSKAGACIHADINGALNTLQKSKVVEWDDNFKVKTPILLEVQKRKAVASCIA

SEQ ID NO: 5462 - protein, 451 aa, unidentified
MARKKAVKVLRKQKKRENIQRFTQKQNIGRACLTAKEFRLLQRMSHSSKALRNVGLYTIKQSYLNNNKMATVKEVDTAMQADMNYWGIQSNSVQAIRRSLFTEVKSFFKGLEQWKKKPETFAGRPKFPNYSGSTDKRIIEIYQVPKVDDNGYWMIPMNVAFRKKFGSIKIRMPKNVRNKKISYIEIVPKQKGRFFEVHYTYEMHVSQMKKPSTTTSNALSCDLGVDRLLSCVTNTGDAFLIDGKKLKSINQYFNKMIRNLQLKNVENGLSKRVVTNKMAALWHKRERQINGYISQTVGLLFKKVKACNIDMVVVGYNTGWKQKSDMGKKNNQKFVQIPFHKLIAAIENKCIKAGIRFLKQEESYTSKASFLDKDKIPVWSKEDRTHYRFSGKRITRGLYQSKSGTCIHADINGALNTLQKSRVVELDDNLKVKTPILLEVQKRKAVASRIA

SEQ ID NO: 5463 - protein, 451 aa, unidentified
MAKKKVVKVLRKQKKRETLRRFTQKQNIGRACLTAQEFRLLQRMSHSSKALRNVGLYTMKQSYLNHNKMATVKEVDTAMQADMNYWGIQSNSVQAIRRALFTEVKSFFKALEQWKKNPEKFTGRPKFPNYSHSTDKRIIEIYQVPKVDENGFWMIPMSVAFRKKFGSIKIRMPKNLRNKNISYIEIVPKQKGRFFEVHYTYEMHVSQMKKQPMTTSNALGCDLGVDRLVSCVTNTGDAFLIDGKKLKSINQYFNKTIRNLQQKNVENGLSKRIVTNKIAALWHKRERQIHGYIAQTVGLLFKKVKEFDIDTIVVGYNAGWKQNSHMGKKNNQKFVQIPFHKLIAAIENKCIKEGIRFFKQEESYTSKASFLDKDPVPVWSKDDRTQYRFSGKRITRGLYQSKAGTCIHADINGALNTLQKSQVVELDGNLKVKTPILLEVQKRKAVASRIA

SEQ ID NO: 5464 - protein, 451 aa, unidentified
MARKKVVKVLRKQKKRETMQRFTQKQNIGRACMTAKEFRLLQRMSHSSKALRNVGLYTMKQSYLNHNRMATVKEVDTAMQADMNYPGVQSNSVQAIRRSLFTEVKSFFKALEQWKKHPEKFTGSPKFPNYSRSTDKRIIEIYQVPKVDENGYWIIPMNVAFRKKFGSIKIRMPKNLRNKNISYIEIVPKQKGRFFEVHYTYEMHISQMKKQSTTTSNALSCDLGVDRLVSCVTNTGDAFLIDGKKLKSINQYFNKIIRNLQQKNIENGLSKRVVTNRMAALWHKRERQINGYISQTVGLLFKKVKAYNIDTIVVGYNAGWKQKSDMGKKNNQTFVQIPFHKLMAAIENKCVKEGIRFVKQEESYTSKASFLDKDPVPVWSKGDRTQYRFSGKRITRGLYQSKAGTCIHADMNGALNTLKKSGVVELDENLKVKTPILLEVQKRKAIASRIA

SEQ ID NO: 5465 - protein, 451 aa, unidentified
MARKKAVKVLRKQKKRETMQRFTQKQNIGRACLTAKEFRLLQRMSHSSKALRNVGLYTMKQSYLNNNRMATVKEVDTAMQADTNYSGVQSNSVQAIRRAVFTEVKSFFKALEQWKKHPEKFTGRPKFPNYSRSTDKRIIEIYQVPKVDENGYWIIPMNVAFRKKFGSIKIRMPKNLRNKKISYIEIIPKQKGRFFEVHYTYEMHVSQVKKPPTTTSNALSCDLGVDRLVSCVTNTGDAFLIDGKKLKSINQYFNKMIRNLGRKNMDNGISKRIVTNQMAVLWHKRERQINGYISQTVGLLFKKVRACNVDTIVVGYNAGWKQKSDMGKKNNQTFVQIPFHKLMAAIENKCIKEGIRFVKQEESYTSKASFLDKDPVPVWSKDGKTHYCFSGKRITRGLYQSKAGTCIHADINGALNTLKKSKVVELDGNLKVKTPILLEVQKRKAVASRIA

SEQ ID NO: 5466 - protein, 451 aa, unidentified
MTRKKAVKVLRKQKKRETMQRFTQKQNIGRACLTAKEFRLLQRMSHSSKALRNVGLYTMKQSYLNYNKMATVKEVDTTMQADMNYWGIQSNSVQAIRRALYAEVKSFFKAMEKWKKNPEKFTGRPKFPNYSRSTDKRIIEIYQVPKVDDNGYWMIPMSVAFRKKFGSIKIRMPKNLRNKNISYIEIVPKQKGRFFEVHYTYEMHVSQMKKQSATTSNALSCDLGVDRLVSCVTNTGDTFLIAGKKLKSINQYFNKMIRNLQQKNIENGLSKRVVTNQMAALWHKRERQINGYISQTVGLLFKKVKAFGIDTIVVGYNVGWKQRSDMGKKNNQTFVQIPFHKLIAAIENKCIKEGIRFLKQEESYTSKASFLDKDPVPVWSKDDKTYYRFSGKRITRGLYKSKAGTCIHADINGALNTLKKSRVVELDESLKVKTPILLEVQKRKAVASRIA

SEQ ID NO: 5467 - protein, 440 aa, unidentified
MARKKAVKVLRKQKKRETMQRFTQKQNIGRACLTAKEFRLLRRMSHSSKALRNVGLYTMKQSYLNDNKMATVKEVDTAMQADMNYWGMQSNSVQAIRRSLFTEVKSFFKAMEQWKKNPEKFTGRPKFPNYSRSTDKRIIEIYQVPKVDESGYWIIPMNIAFRKKFGSIKIRMPKNLRHKKISYIEIVPKQKGRFFEVHYTYEMHISQMKKPSTTTSNALSCDLGVDRLVSCVTNTGDAFLIDGKKLKSINQYFNKVIRNLQLKNVENGLSKRIVTNKMAVLWHKRERQINSYISQAVGLLFKKVKEFDIDTIVVGYNTGWKQKSDIGKKNNQKFVQIPFQKLIAAIENKCIKEGIRFLKQEESYTSKASFLDKDPVPVWSKDDKMQYLFSGKRITRGLYQSKAGTCIHADINGALNTLQKSRVVELDENLKVRTPILLEV

SEQ ID NO: 5468 - protein, 476 aa, unidentified
MAFLKKHNLRKKIIVMNSLRKVVKTMARKKAVKVLRKQNKRETMQRFTQKQNIGRACLTAKEFRLLKRMSHSSKALRNVGLYTIKQSYLNHNRVATVKEVDNAMQADMNYSGVQSNSVQAIRRALFTEVKSFFKALEQWKKHPDKFTGRPKFPNYSRSTDKRIIEIYQVPKVDENGYWIIPMNVAFRKKFGSIRIRMPKNLRNKNISYIEIVPKQKGRFFEVHYTYEMHVSQMKKQPMTTSNALGCDLGVDRLVSCVTNTGDAFLIDGKKLKSINQYFNKTIRNLQQKNVENGLSKRIVTNKIAALWHKRERQIHGYIAQTVGLLFKKVKEFDIDTIVVGYNAGWKQKSHMGKKNNQTFVQIPFEKLIAAIENKCIKEGIRFFKQEESYTSKASFLDKDPVPVWSKDDRTQYRFSGKRITRGLYQSKAGTCIHADMNGALNTLKKSGVVELDDNLKVKTPILLEVQKRKAVASRIA

SEQ ID NO: 5469 - protein, 451 aa, unidentified
MARKKAVKVLRKQKKRETMQRFTQKQHIGRACPTAKEFRLLQRMSHSSKALRNVGLYTIKQSYLNDNKMATVKEVDNAMQADMNYSGVQSNSVQAIRRALFTEVKSFFKAMEQWKKNPEKFTGRPKFPNYSRSTDKRIIEIYQVPKVDENGYWMIPMNVAFRQKFGSIKIRMPKNLRNKKISYIEIVPKQKGRFFEVHYIYEVHISQMKKPSTTTSNALGCDLGVDRLVSCVTNTGDAFLIDGKKLKSINQYFNKMICNLQQKNMKNGLSKRVVTNKIAALWHKRDRQINGYIAQTVGLLFKKVKEFDIDTIVVGYNAGWKQKSHMGKKNNQTFVQIPFHKLMAAIENKCVKEGIRFLKQEESYTSKASFLDKDPVPVWSKDDRTQYRFSGKRITRGLYQSKAGTCIHADINGALNTLKKSKVVELDDNLKVKTPILLEVQKRKAVASRIA

SEQ ID NO: 5470 - protein, 451 aa, unidentified
MAKKKAVKVLRKQKKRETLRRFTQKQNIGRACLTAQEFRLLQRMSHSSKALRNVGLYTMKHSYLNHNKMATVKEVDIAMQADMNYWGIQSNSLQAIRRALFTEVKSFFKALEQWKKNPEKFTGRPKFPNYSHSTDKRIIEIYQVPKVDENGFWMIPMSVAFRKKFGSIKIRMPKNLRNKNISYIEIVPKQKGRFFEVHYTYEMHVSQMKKQPMTTSNALGCDLGVDRLVSCVTNTGDAFLIDGKKLKSINQYFNKTIRNLQQKNVENGLSKRIVTNKIAALWHKRERQIHGYIAQTVGLLFKKVKEFDIDTIVVGYNAGWKQNSHMGKKNNQKFVQIPFHKLIAAIENKCIKEGIRFFKQEESYTSKASFLDKDPVPVWSKDDRTQYRFSGKRITRGLYQSKAGTCIHADINGALNTLQKSQVVELDGNLKVKTPILLEVQKRKAVASRIA

SEQ ID NO: 5471 - protein, 451 aa, unidentified
MAKKKAVKVLRKQKKRETLRRFTQKQNIGRACLTAQEFRLLQRMSHSSKALRNVGLYTMKQSYLNHNKMATVKEVDTAMQADMNYWGIQSNSVQAIRRALFTEVKSFFKALEQWKKNPEKFTGRPKFPNYSHSTDKRIIEIYQVPKVDENGFWMIPMSVAFRKKFGSIKIRMPKNLRNKNISYIEIVPKQKGRFFEVHYTYEMHVSQMKKQPMTTSNALGCDLGVDRLVSCVTNTGDAFLIDGKKLKSINQYFNKTIRNLQQKNVENGLSKRIVTNKIAALWHKRERQIHGYIAQTVGLLFKKVKEFDIDTIVVGYNADWKQNSHMGKKNNQKFVQIPFHKLIAAIENKCIKEGIRFFKQEESYTSKASFLDKDPVPVWSKDDRTQYRFSGKRITRGLYQSKAGTCIHADINGALNTLQKSQVVELDGNLKVKTPILLEVQKRKAVASRIA

SEQ ID NO: 5472 - protein, 451 aa, unidentified
MVKKKAVKVLRKQKKRETLRRFTQKQNIGRACLTAKEFRLLQRMSHSSKALRNVGLYTIKQSYLNHNRMATVKEVDTAMQADMNYWGMQSNSVQAIRRALYAEVKSFFKALKKWKENPETFTGRPKFPNYSRSTDKRIIEIYQVPKVDENGYWMIPMSVAFRKKFGSIKIRMPKNIRNKKISYIEIVPKQKGRFFEVHYTYEMHVSQMKKQSTTISNALSCDLGVDRLVSCVTNTGDTFLIDGKKLKSINQYFNKKIRNLQQKNIENGISKRVVTNKIAALWHKREKQINGYISQTVGLLFKKVKAFGIDTIVVGYNAGWKQKSDMGKKNNQKFVQIPFHKLIAAIENKCIKEGIRFFKQEESYTSKASFLDKDPVPVWSKDDRTQYRFSGKRMTRGLYQSKAGTCIHADINGALNALEKSRVVEWDDNLKVKTPILLEVQKRKAVASRIA

SEQ ID NO: 5473 - protein, 451 aa, unidentified
MARKKAVKILRKQKKRETMQRFTQKQHIGRACLTAKEFRLLQRMSHSSKALRNVGLYTIKQSYLNDNKTATVKEVDNAMHADMNYWGVQSNSVQAIRRALFTEVKSFFKALEQWKKNPEKFTGRPKFPNYSRSTDKRIIEIYQVPKVDENGYWIIPMNVAFRKKFGSIRIRMPKNLRNKKISYIEIVPKQKGRFFEVHYTYEMHVSQMKKPSTTTSNALSCDLGVDRLVSCATNTGDTFLIDGKKLKSINQYFNKMIRNLQQKNMENGLSKRVVTNQMAALWHKRERQINGYISQTVGLLFKKVKACNIDTVVVGYNAGWKQKSDMGKKNNQKFVQIPFHKLVAAIENKCVKEGIRFLKQEESYTSKASFLDKDPVPVWSKDDRTQYRFSGKRITRGLYQSKAGTCIHADINGALNTLEKSKVVELEENLKVKTPILLEVQKRKAVASRIA

SEQ ID NO: 5474 - protein, 451 aa, unidentified
MVKKKAVKVLRKQKKRENIQRFTQKQNIGRACLTAKEFRLLQRTSHSSKALRNVGLYKIKQSYLNHNKMATVKEVDNAMQADMNYWGIQSNSVQAIRRALFTEVKSFFKAWEQWKKNPETFTGRPKFPNYSRSTDKRIIEIYQVPKVDDNGYWMIPMNVAFRKKFGSIKIRMPKNLRNKKISYIEIVPKQKGRFFEVHYTYEMHVSQMKQQSTTTSNALSCDLGVDRLLSCVTNTGDTFLIDGKKLKSINQYFNKKIRNLQQKNIENGISKRVVTNRMAALWHKRERQVNGYISQTVGLLFKKVKAFDIDTIVVGYNTGWKQKSDMGKKNNQKFVQIPFHKLIAAIENKCIKEGIRFLKQEESYTSKASFLDKDPIPVWSKDDRAHYRFSGRRITRGLYQSKAGTCIHADINGALNTLEKSRVVELDDNLKVKTPILLEVQKRKAVASRIA

SEQ ID NO: 5475 - protein, 451 aa, unidentified
MARKKAVKVLRKQKKRETMQRFTQKQNIGRACLTAKEFRLLQRMSHSSKALRNVGLYTIKQSYLNNNKMATVKEVDTAMQTDMNYWGIQSNSVQAIRRALFTEVKSFFKAMEQWKKKPETFTGRPKFPNYSRSTDKRIIEIYQVPKVDNNGYWMIPMNVAFRKKFGSIKIRMPKNVRNKKISYIEIVPKQKGRFFEVHYTYEMHVSQMKKQPTTISKALSCDLGVDRLVSCVTNTGDAFLIDGKKLKSINQYFNKMIRNLQLKNMENGLSKRVVTNKMAALWHKRERQINGYISQTVGLLFEKVKACNIDTVVVGYNAGWKQKSDMGKKNNQKFVQIPFHKLIAAIENKCIKEGIRFLKQEESYTSKASFLDKDRVPVWDKDDRTHYRFSGKRITRGLYQSKAGTCIHADINGALNTLEKSKIVQLDDNLKVKTPILLKVQKRRAFASRIA

SEQ ID NO: 5476 - protein, 412 aa, unidentified
MQLVERHIIQPNHPHYQEIDKLCFAAKNLYNYANFHTRQSFILAQKYLDYNCLAKQLKSTEPYQALPAKVAQQVLLGLHRNWLSFFAAIKAYTKDKTKFLSRPKLPKYKHKEKGRHLLVYTVQSVSKPKMKAGVIHLSKTQIDIPTKVEYVHLNQVRIVPKIDHYVVEAVYEKEELDYVLDSQAIAAIDLGIDNLATLTSNQPGFLPVLVSGRIIKSINRYYNQKKAKLQSLLPSHQKTSKQLQNLTKKRNFRVDDYLHKASRLVIDHLVKQGLGTLVIGQNPLWKQNVALGKRNNQNFVCIPHTRFVKQLIYKAKLVGIKVLVAEESYTSVASFLDQDIIPTYGKADSIEVKFSGRRIRTKLYKTGNDQLIHADVNGSLNILRKVVPTAFSLGIGGVVVRPVGVIPGKQMA

SEQ ID NO: 5477 - protein, 429 aa, unidentified
MYGCQQVLINPDKDLKALLEYVCIEANKLINCGIYYSRQYYFRTGKFPSQADLHKQIGTVQKNKHYQALYSDTAQQILTGVAESFKSFTSLLKGVKKGTVTQKPRLPNYRTPGGLALATFTGRSLKLKDGMIRFPLGSLVKAWFGIDSFYLPMPANLDFKSIREVRILPRNRCFYAEFVYQQNIKVIELDKSKVLGIDHGLNNWLTCVSNIGTSFIVDGLHLKSLNQWYNKSVAKIKENKPQGFWSNRLAAITEKRHRQIRDAVNKAARIVINYCIDNKIGSIVFGWNTGQKDGADMGKKNNQKFVQIPTARLKNRIEQLCEQSGIDFIETEESYTSKASFLDSDELPTFGEKPEGWKSSGIRTERGLFKTATGIKINADCNGAANIVRKVAMMAKFDLAGISRGCLSQPKKVLLWTLQKSPCLQTGEA

SEQ ID NO: 5478 - protein, 420 aa, unidentified
MAKPKKLMGVQQNRISTDKDTEAILEYLCTESNKLSNCAVYYARQIYFKTRKFVSSFDLVKAVGKNKHFSALPSEVAVQTCLSVGESVKSFSELIKKSGKGELSQKPKFPNYRKPGLNLIAFPKRGLKLINGKIRFPLGWQIKAWFGIKEFFLPMPSNLCFDLIKEVRILPRNRELYIEFVYEGAASTVRLDKSKVLGIDHGINNWLTCVSNVGTSFLVDGLHLKSLNQWYNKSVAKIKENKSQGFWSNRLAAITEKRNRQMRDAVNKAARIVINHCVENNIGSIVFGWNQGQKDGADMGKNNNQNFVQIPTAKLKTRIEQLCEQYGIDFIETEESYTSKTSFLDNDVLPTIGAKPEGWKSSGIRTNRGLFKTLTGIKINADCNGAANIIRKVAMMVTFDLTGISRGCLSQPKKVLLWTL

SEQ ID NO: 5479 - protein, 429 aa, unidentified
MYGCQQVLINPDKDLKALLEYVCIEANKLINCGIYYSRQYYFRTGKFPSQADLHKQIGTVQKNKHYQALYSDTAQQILTGVAESFKSFTSLLKGVKKGTVTQKPRLPNYRTPGGLALATFTGRSLKLKDGMIRFPLGSLVKAWFGIDSFYLPMPANLDFKSIREVRILPRNRCFYAEFVYQQNIKVIELDKSKVLGIDHGLNNWLTCVSNIGTSFIVDGLHLKSLNQWHNKSVAKIKENKPQGFWSNRLAAITEKRNRQIRDAVNKAARIVINYCIDNKIGSIVFGWNTGQKDGADMGKKNNQKFVQIPTARLKNRIEQLCEQSGIDFIETEESYTSKASFLDSDELPTFGEKPEGWKSSGIRTERGLFKTATGIKINADCNGAANIVRKVAMMAKFDLAGISRGCLSQPKKVLLWTLQKSPCLQTGEA

SEQ ID NO: 5480 - protein, 420 aa, unidentified
MQLAEKHIIKSGHRFFEQIDALCFASKNLYNAANYIIRQNYIFGWGYLNYNKMHSYMKTHETYRYLPRKVSQQILMVLDRNWKSFFACVQEYKSHPDKFKASPAMPKYKDKAKGRNLLIYTIQAISKPGLVSGRVKLSGTNIDFPTHVANQVCQVRIVPKCDCYVIEVIYEQQESTPVNSDACAAIDLGLNNLATLTSNQKGFVPLLINGRPLKSINQFFNKRKAALQSKLSRKRQTSVRIQRLTRKRNLHIDNYLHNSSRFLVDHLVEKQIGTLVIGKNNLWKQEINLGKRNNQNFVTVPYSRFIEMLTYKCQLAGIMVVVTEESYTSKSSFLDFDPIPTYGHVTDSPSFSGKRISRGLYRTSGNRFINSDVNGSYNILRKAIPNAFADGIGSCVVQPRRVTPNKVKAKGKSEMVSKAM

SEQ ID NO: 5481 - protein, 420 aa, unidentified
MQLAEKHIIKSGHRFFEQIDALCFASKNLYNAANYIIRQNYIFGWGYLNYNKMHSYMKTHETYRYLPRKVSQQILMVLDRNWKSFFACVQEYKSHPDKFKASPAMPKYKDKAKGRNLLIYTIQAISKPGLVSGRVKLSGTNIDFPTHVANQVCQVRIVPKCDCYVIEVIYEQQESTPVNSHESAAIDLGLNNLATLTSNQKGFVPLLINGRPLKSINQFFNKRKAALQSKLSRKRQTSVRIQRLTRKRNLHIDNYLHNSSRFLVDHLVEKQIGTLVIGKNNLWKQEINLGKRNNQNFVTVPYSRFIEMLTYKCQLAGIMVVVTEESYTSKSSFLDFDPIPTYGHVTDSPSFSGKRISRGLYRTSGNRFINSDVNGSYNILRKAIPNAFADGIGSCVVQPRRVTPNKVKAKGKSEMVSKAM

SEQ ID NO: 5482 - protein, 434 aa, unidentified
MYTNDSTNNEVIKLYGCQQILISPSNELKAILEYICLYARKLSDCGIYYARQMFFKKGKILSKFDLINELTNNKHYQALYSQVAQQALMNVAESFKSFKGLLREVRKGNVNQRPRVPNYRKSGLVLVSYPKQAIKLKDGMLRFPLGQLVKTWFKIDSFFLPMPTNLKFSDIKEVRILPRNMCFYVEFVYEQPDKVVELNKSNVLGIDHGINNWLTCVSNIGTSFIVDGKHLKSLNQWYNKQISKFKEGKPQGFWSEKLALITEKRNRQVRDAVNKAARIVINHCIKNNIGTIVFGWNKGQKDGANMGVKQNQKFVQIPTGRLKDRIAQLCEQYGIQFVETEESYTSKSSFLDGDTLPTFGEKPEGWQPSGRRVKRGLYKSSQGFLINADCNGAANIIRKVAAKLGLVLNVVNRVLLNAPVRIRLWHAASKQPLP

SEQ ID NO: 5483 - protein, 432 aa, unidentified
MYGCQQNLINPDVELKAVLEFICSESHKLTNCGIYYARQLYFKTSKLIGKYDLEKEYKTNKHYQVLHSQAAQQILRSVAESFKSFKELDKKYNKGELHFKPKLPKYRKGAGYALVTYPKQALKLVGNNIKIPLGNTVKRWFKLDSFTIPMPSNLQFADIKELRILPRNQCFYAEFVYEQDSAPELNLNPQYALAIDPGINNWLSCISNVGTSFIVDGRKVKSLNQWYNKRVSILKEGKPQGYWDDQLAHITEKRNRQMRDAVNKAARLVVDHCIKHHIGTVVFGWNQGQRQEVVLGKTTQSFVQIPTAKLKERVRQLCEHYGIKFVETEESYTSKSSFLDGDFLPTFGAKPEGWTPSGKRVQRGMYRTGTGKLINADLNGAANILKKVETQLGLCLVKVCRQVLTLATRFRIWETKTEKRKGVAEALRVATV

SEQ ID NO: 5484 - protein, 466 aa, unidentified
MYKTQQIRLTDAINDETNNFLILLCEQASKLSNEVVYSIRQKHFETCQRVEFFDKDGFYRSGFKLKKISVDSYASLCKEFAASQHYQILGGQQAQQTIKSVIESFRSYNELLPLFFNGELKARPRIPGYRKDGLTVVTFPVQAVKLDIETGMCRLAISRELSKDKDILSDVWIPGGYGFKPHQLVEVRILPRNRELYAEYVYKSGNEGVSCLLGLDYEQALGIDPGTNNWLTCVSTLGKSLIIDGRQLKSLNTNYNRKVKKIKTGKPQGFWSEELASLAELRNCQMRDAINKTARFIVNYCLNHKIGNVVFGWGQGVKDKITLGRRNNQNFVQIPTSKLKERIRQLCEEIGIQFTETEESYTSKTSFLDGDFLPKFNGEKPGSWKPSGKRVKRGMYKTKNNLVINADCNGAANILVKVKTQLGLCLAKVIREVFTLPKRYNVFSSLKKIYRKRSEAGLLACFATSV

SEQ ID NO: 5485 - protein, 433 aa, unidentified
MKNNRWFPTYLTQKNHLRVDKKTYKILRTLTHLSKSLYNLTLYTVKQHYELNGTFLPYAKAYHIVKDSEPYKLLPSQAAQQTMKIVERNFRSFFHVINERRKGNYNRPVRPPKYLPKNGHFLLIFPYQSFRVKGDKIILSLGRNFAEKYGVKHLEFTLPKNVKGHRIKEVRIVPRYNALWFEIEYVYEVEPEEKELDYSKYLAIDLGVNNFATGVSTTGTVFIIEGRGLKSFNRWGNREKARLQSQYDKQGVKFGKKMAWLLRKRKNVINDFMNKAVSYIVNYCLENGIGNIVIGELKGIKQNANLGKRNNQNFQYVPFGLFKRKLKAKCERYGINYIEVDEAYTSKVDALALEPIGKKKEYLGRRVKRGLFQSSTGTLVNADVNGALNILRKVAGDSPVRGIAGSGRVNRPVRVRLPWGGLTPHEAPSVRVG

SEQ ID NO: 5486 - protein, 415 aa, unidentified
MGKKTYKLLRTLTHLSKDLYNITLYTVKQHYELNGTFLPYAKAYHLVKDTEPYKLLPSQVAQQTMKIVERNFRSFFHVLNERKKGNYNRPVSPPKYLPKNGHFILIFPYQSFRVKEDRVILTLGKNFAEKYGVKHLEIPLPKNVKGHRIKEIRILPKYNALWFEVEYVYEVQPEEKDLDRSKYLAIDLGLDNFATCVSTTGTAFIIEGRGLKSFNRWWNKEKAKLQSQYDKQGIKFGRKMAWLLKKRKNVVNDFMNKAVNYIVNYCLENGIGNIVIGELKGIKRNANLGKRNNQNFQFVPYGLFKQKLKAKCERYGINYIEVDEAYTSKVDALALEPIGKRKKYLGKRVKRGLFQSSTGVLINADVNGALNILRKVAGDSPVGEIAGSGRVNRPVRVRLSWGGLTPHEAPSARAG

SEQ ID NO: 5487 - protein, 451 aa, unidentified
MARKKAVKVLRKQKKRETMQRFTQKQNIGRACLTAKEFRLLQRMSHSSKALRNVGLYTIKQSYLNDNRVATVKEVDTAMQNDMNYSGIQSNSVQAIRRALFTEVKSFFKALEQWKKNPEKFTGRPKFPNYSRSTDKRIIEIYQVPKVDENGYWMIPMNVAFRKKFGSIQIRMPKNLRNKNISYIEIVPKQKGRFFEVHYTYEMHVSQMKKPPTTTSNALSCDLGVDRLLSCVTNTGDAFLIDGKKLKSINQYFNKMICNLQQKNMNNGISKRIVTNKMAALWHKRERQINGYIAQTVGLLFKKVKELDIDTIVVGYNAGWKQKSHMGEKNNQIFVQIPFEKLIAAIENKCIKEGIRFLKQEESYTSKASFLDKDPVPVWSKDDRTQYRFSGKRITRGLYQSKAGTCIHADMNGALNTLKKSEVVELDDNLKVKTPILLEVQKRKAVASRIA

SEQ ID NO: 5488 - protein, 435 aa, unidentified
MRQMYGCQQNLINPDVELKAVLEFICSESHKLTNCGIYYARQLYFKTSKLIGKYDLEKEYKTNKHYQVLHSQAAQQILRSVAESFKSFKELDKKYNKGELHFKPKLPKYRKGAGYALVTYPKQALKLVGNNIKIPLGNTVKRWFKLDSFTIPMPSNLQFADIKELRILPRNQCFYAEFVYEQDSAPELNLNPQYALAIDPGINNWLSCISNVGTSFIVDGRKVKSLNQWYNKRVSILKEGKPQGYWDDQLAHITEKRNRQMRDAVNKAARLVVDHCIKHHIGTVVFGWNQGQRQEVVLGKTTQSFVQIPTAKLKERVRQLCEHYGIKFVETEESYTSKSSFLDGDFLPTFGAKPEGWTPSGKRVQRGMYRTGTGKLINADLNGAANILKKVETQLGLCLVKVCRQVLTLATRFRIWETKTEKRKGVAEALRVATV

SEQ ID NO: 5489 - protein, 423 aa, unidentified
MKLYGCQQILISPSNELKAILEYICLYARKLSDCGIYYARQMFFKKGKILSKFDLINELTNNKHYQALYSQVAQQALMNVAESFKSFKGLLREVRKGNVNQRPRVPNYRKSGLVLVSYPKQAIKLKDGMLRFPLGQLVKTWFKIDSFFLPMPTNLKFSDIKEVRILPRNMCFYVEFVYEQPDKVVELNKSNVLGIDHGINNWLTCVSNIGTSFIVDGKHLKSLNQWYNKQISKFKEGKPQGFWSEKLALITEKRNRQVRDAVNKAARIVINHCIKNNIGTIVFGWNKGQKDGANMGVKQNQKFVQIPTGRLKDRIAQLCEQYGIQFVETEESYTSKSSFLDGDTLPTFGEKPEGWQPSGRRVKRGLYKSSQGFLINADCNGAANIIRKVAAKLGLVLNVVNRVLLNAPVRIRLWHAASKQPLP

SEQ ID NO: 5490 - protein, 409 aa, unidentified
MTLTERHIIRPTHPIFKRIKDFCHLSKNLYNYANFILREHYFAGFKLPTAYDLINRFVKESQRDYKALPAQSAQQVLMLLSQNWKSYLKALKAYKLKPSSFLARPKIPKFKPKDGISIGVLTNQQTSFTKGRMTKIKFPKKANLKRLITKINPQTSRLKQVRLIPKTTCFIVEVVYEQTTHKLPQTHGIGIMGIDLGLNNFVTAIDNQSSPFIIKGGGVKSVNQWFNKLKAHYQAKAKTSNKRFWTKRLGKLALWRECKVNDFMHKASAYVVGHCLKKGISIIVIGKNDGWKQELKLGKRTNQNFTNIPYESFIEKLAYKCALVGITLHTTEERFTSKCDHLANEPMQHHEQYLGKRVKRGLFKSSIGKSLNADINGAIGILRKVFPDAVKTLRDSGVVFTPVKISLAF

SEQ ID NO: 5491 - protein, 409 aa, unidentified
MTLTERHIIRPTHPIFKRIKDFCHLSKNLYNYANFILREHYFAGFKLPTAYDLINRFVKESQRDYKALPAQSAQQVLMLLSQNWKSYLKALKAYKLKPSSFLARPKIPKFKPKDGVSIGVLTNQQTSFTKGRMTKIKFPKKANLKRLITKINPQTSRLKQVRLIPKTTCFIVEVVYEQTTHKLPQTHGIGIMGIDLGLNNFVTAIDNQSSPFIIKGGGVKSVNQWFNKLKAHYQAKAKTSNKRFWTKRLGKLALWRECKVNDFMHKASAYVVGHCLKKGISTIVIGKNDGWKQELKLGKRTNQNFTNIPYESFIEKLAYKCALVGITLHTTEESFTSKCDHLANEPMQHHEQYLGKRVKRGLFKSSIGKSLNADINGAIGILRKVFPDAVKTLRDSGVVFTPVKISLAF

SEQ ID NO: 5492 - protein, 409 aa, unidentified
MTLTERHIIRPTHPIFKRIKDFCHLSKNLYNYANFILREHYFAGFKLPTAYDLINRFVKESQRDYKALPAQSAQQVLMLLSQNWKSYLKALKAYKLKPSSFLARPKIPKFKPKDGVSIGVLTNQQTSFTKGCMTKIKFPKKANLKRLITKINPQTSRLKQVRLIPKTTCFIVEVVYEQTTHKLPQTHGIGIMGIDLGLNNFVTAIDNQSSPFIIKGGGVKSVNQWFNKLKAHYQAKAKTSNKHFWTKRLGKLALWRECKVNDFMHKASTYVVGHCLKKGISTIVIGKNDGWKQELKLGKRTNQNFTNIPYESFIEKLAYKSALVGITLHTTEERFTSKCDHLANEPMQHHEQYLGKRVKRGLFKSSIGKSLNADINGAIGILRKVFPDAVKTLRDSGVVFTPVKISLAF

SEQ ID NO: 5493 - protein, 451 aa, unidentified
MAKKKAVKVLRKQKKRETLQRFTQKQNIGRACLTAKEFRLLQRMSHSSKALRNVGLYTMKQSYLNHNRMATVKEVDTAMQADMNYWGMQSNSVQAIRRALYAEVKSFFKAMEQWKKNPEKFTGRPKFPNYSRSTDKRIIEIYQVPKVDENGYWMIPMNVAFRKKFGSIKIRMPKNIRNKKISYIEIVPKQKGRFFEVHYTYEMHVSQMKQQSTTTSNALSCDLGVDRLVSCVTNTGDAFLIDGKKLKSINQYFNKMICNLQQKNLENGISKRVVTNTMAVLWHKRERQINGYISQTVGLLFKKVKAFGIDTIVVGYNVRWKQKSDMGKKNNQKFVQIPFHKLLAAIENKCIKEGIRFLKQEESYTSKASFLDKDPVPVWSKGDRSHYRFSGKRITRGLYRSQSGTCIHADINGALNTLQKSKVVELDESLKVKTPILLEVQKRKAVASRIA

SEQ ID NO: 5494 - protein, 474 aa, unidentified
MFRFVPNIDLSKVMNALRKVVKTMARKKAVKVLRKQKKRETMQRFTQKQNIGRACLTAKEFRLLQRMSHSSKALRNVGLYTIKQSYLNHNKMATVKEVDTAMQADMNYSGMQSNSVQAIRRALFTEVKSFFKALEQWKRNPEKFTGRPKFPNYSRSTDKRIIEIYQVPKVDDNGYWMIPMSVAFRKKFGSIKIRMPINLRNKKISYIEIVPKQKGRFFEVHYTYEMHVSQMKKQPTTTINALSCDLGVDRLLSCVTNTGDTFLIDGKKLKSINQYFNKMICNLQQKNIENGISKRVVTNKMAALWHKRERQINGYISQTVGLLFKKVKAFGIDTIVVGYNVGWKQKSDMGKKNNQKFVQIPFHKLIAAIENKCVKEGIRFLKQEESYTSKASFLDKDRVPVWSKDDSTHYHFSGKRITRGLYQSKAGTCIHADINGALNTLQKSKVVELDENLKVKTPILLEVQKRKAVASRIA

SEQ ID NO: 5495 - protein, 451 aa, unidentified
MARKKAVKVLRKQKKRENIQRFTQKQNIGRACLTAKEFRLLQRMSHSSKALRNVGLYTMKQSYLNNKKMATIKEVDTAMQADMNYWGIQSNSVQAIRRALYAEVKSFFKALEQWKKKPETFTGRPKFPNYSRSTDKRIIEIYQVPKVDDNGYWMIPMSVAFRKKFGSIKIRMPKNVRNKKISYIEIVPKQKGRFFEVHYTYEMHVSQMKKPSTTTSNALSCDLGVDRLVSCVTNTGDAFLIDGKKLKSINQYFNKKIRNLQQKNIENGISKRVVTNRMAALWHKRERQIIGYISQTVGLLFKKVKECSVDTVVVGYNAGWKQKSDMGKKNNQQFVQIPFHKLIAAIENKCIKEGIRFFKQEESYTSKASFLDKDPVPVWSKDNRAQYYFSGKRITRGLYQSKAGTCIHADINGALNTLQKSKVVELKENLKVKTPILLEVQKRKAVASRIA

SEQ ID NO: 5496 - protein, 451 aa, unidentified
MAKKKAVKVLRKQKKRETLRRFTQKQNIGRACLTAQEFRLLQRMSHSSKALRNVGLYTMKQSYLNHNKMATVKEVDTAMQADMNYWGIQSNSVQAIRRALFTEVKSFFKALEQWKKNPEKFTGRPKFPNYSHSTDKRIIEIYQVPKVDENGFWMIPMSVAFRKKFGSIQIRMPKNLRNKNISYIEIVPKQKGRFFEVHYTYEMHVSQMKQQSTTTSNALSCDLGVDRLVSCVTNTGDAFLIDGKKLKSINQYFNKMICNLQQKNMDNGISKRIVTNKMAALWHKRERQINGYIAQTVGLLFKKVKESDIDTIVVGYNAGWKQNSHMGKKNNQKFVQIPFHKLIAAIENKCIKEGIRFFKQEENYTSKASFLDKDPVPVWSKDNRAQYYFSGKRITRGLYQSKAGTCIHADINGALNTLQKSQVVELDGNLKVKTPILLEVQKRKAVASRIA

SEQ ID NO: 5497 - protein, 451 aa, unidentified
MARKKAVKVLRKQKKRETMQRFTQKQNIGRACLTAKEFRLLQRMSHSSKALRNVGLYTIKQSYLNNNKIATVKEVDTAMQADLNYWSMQSNSVQAIRRALFTEVKSFFKALEQWKKKPEAFTGRPKFPNYSRSTDKRIIEIYQVPKVDENGYWIIPMSVAFRKKFGSIKIRMPKNLRNKKISYIEIVPKQKGRFFEVHYTYEMHVSQMKKQSTTTSNALSCDLGVDRLVSCATNTGDTFLIDGKKLKSINQYFNKMICNLQQKNIDNGISKRIVTNQMAALWHKRERQINGYISQTIGLLFKKVKALGIDTVVVGYNVGWKQKSDMGKKNNQKFVQIPFHKLIAAIENKCIKEGIRFFKQEESYTSKASFLDKDPVPVWSKDERTHYHFSGKRITRGLYQSKAGTCIHADINGALNTLEKSRVVELDDNLKVKTPILLEVQKRKAVASRIA

SEQ ID NO: 5498 - protein, 451 aa, unidentified
MARKKAVKVLRKQKKRENMQRFTQKQNIGRACLTAKEFHLLQRMSHSSKALRNVGLYTMKQSYLNDNKMATVKEVDTAMQADTNYWGIQSNSVQAIRRALYAEVKSFFKALEQWKKNPEKFTGRPKFPNYSRSTDKRIIEIYQVPKVDENGYWIIPMNVAFRKKFGSIQIRMPKNLRNKNISYIEIVPKQKGRFFEVHYTYEMHVSQMKKPPATTSNALSCDLGVDRLLSCVTNTGDAFLIDGKKLKSINQYFNKMICNLGQKNMDNGISKRIVTNKMAALWHKRERQINGYIAQTVGLLFKKVKKFDIDTIVIGYNAGWKQKSHMGKKNNQKFVQIPFQKLIAAIENKCVKEGIRFFKQEESYTSKASFLDKDPVPVWSKDDKTQYRFSGKRITRGLYQSKAGTCIHADINGALNTLKKSKIVELDENLKVKTPILLEVQKRKAVTSRIA

SEQ ID NO: 5499 - protein, 451 aa, unidentified
MARKKAVKVLRKQKKRENIQRFTQKQNIGRACLTAKEFRLLQRMSHSSKALRNVGLYTIKQSYLNNNKIATVKEVDTAMQADMNYWGIQSNSVQAIRRALFTEVKSFFKALEQWKKKPEKFTGRPKFPNYSRSTDKRIIEIYQVPKVDENGYWMIPMNVAFRKKFGSIKIRMPKNLRNKKISYIEIVPKQKGRFFEVHYTYDMHVSQMKQQSTTTSNALSCDLGVDRLVSCVTNTGDTFLIDGKKLKSINQYFNKMIHNLQQKNVDNGISKRIVTNRMAALWHKRERQINGYISQTVGLLFKKVKACNIDTVVVGYNASWKQKSDMGKKNNQTFVQIPFHKLIAAIENKCIKEGIRFFKQEESYTSKASFLDKDPVPVWSKDDRTHYRFSGKRITRGLYQSKSGRCIHSDINGALNTLEKSRVVELDESLKVKTPILLEVQKRKAVASRIA

SEQ ID NO: 5500 - protein, 451 aa, unidentified
MARKKAVKVLRKQKKRENMQRFTQKQNIGRACLTAKEFRLLQRMSHSSKALRNVGLYTMKQSYLNHNKMATVKEVDTAMQADMNYWGIQSNSVQAIRRALYAEVKSFFKAWEQWKKKPETFTGRPKFPNYSRSTDKRIIEIYQVPKVDDNGYWMIPMNVAFRKKFGSIKIRMPKNVRNKKISYIEIVPKQKGRFFEVHYTYEMHVSQMKKQSTTTSNALSCDLGVDRLLSCVTNTGDTFLIDGKKLKSINQYFNKMIRNLQQKNMDNGISKRIVTNKMATLWHKRERQINGYISQTVGLLFKKVKAFNIDTVVVGYNAGWKQKSDMGKKNNQKFVQIPFHKLIAAIENKCVKEGIRFLKQEESYTSKASFLDKDRIPVWSKDDRTHYRFSGKRITRGLYQSKAGTCIHADINGALNTLQKSRVVEWDDNLKVKTPILLEVQKRKAVASCIA

SEQ ID NO: 5501 - protein, 451 aa, unidentified
MARKKAVKVLRKQKKRENMQRFTQKQNIGRACLTAKEFRLLQRMSHSSKALRNVGLYTMKQSYLNNNKMATVKEVDTAMQADMNYSGMQSNSVQAIRRALFTEVKSFFKAWEQWKKNPEKFTGRPKFPNYSRSTDKRIIEIYQVPKVDDNGFWMIPMNVAFRKKFRSIKIRMPKNLRNKKISYIEIVPKQKGRFFEVHYTYEMHVSQMKKPSTTTSNALSCDLGVDRLLSCVTNTGDTFLIDGKKLKSINQYFNKMIRNLQQKNMDNGISKRIVTNQVAALWHKRERQINGYISQTVGLLFKKVKACNIDTVVVGYNAGWKQKSDMGKKNNQKFVQIPFHKLIVAIENKCVKEGIRFLKQEESYTSKASFLDKDSVPAWSKDDRTHYRFSGKRINRGLYQSRAGICIHADINGALNTLQKSKVVQLDDNLKVKTPILLEVQKRKAVASRIA

SEQ ID NO: 5502 - protein, 451 aa, unidentified
MARKKAVKVLRKQKKRENMQRFTQKQNIGRACLTAKEFRLLQRMSHSSKALRNVGLYTMKQSYLNHNKMATVKEVDTAMQADMNYWGIQSNSVQAIRRALYAEVKSFFKALEQWKKNPEKFTGRPKFPNYSRSTDKRIIEIYQVPKVDDNGYWMIPMSVVFRKKFGSIKIRMPKNIRNKKISYIEIVPKQKGRFFEVHYTYEMHVSQMKQQSTTTSNALSCDLGVDRLLSCVTNTGDAFLIDGKKLKSINQYFNKMIRNLGRKNMDNGISKRVVTNKMAAFWHKRERQINGYISQTVGLLFKKVKAFGIDTVVVGYNTGWKQKSDMGKKNNQTFVQIPFHKLIAAIENKCIKEGIRFLKQEESYTSKASFLDKDPVPVWSKDDRTHYRFSGKRITRGLYQSKAGTCIHADINGALNTLQKSKVVQLDDNLKVKTPILLEVQKRKAFASRIA

SEQ ID NO: 5503 - protein, 451 aa, unidentified
MARKKAVKVLRKQKKRENIQRFTQKQNIGRACLTAKEFRLLQRMSHSSKALRNVGLYTMKQSYLNNKKIATVKEVDTAMQADMNYWCMQSNSVQAIRRALYVEVKSFFKALEKWKKNPEKFTGRPKFPNYSRSTDKRIIEIYQVPKVDDNGYWMIPMNVAFRKKFGSIKIRMPKNLRNKKISYIEIVPKQKGRFFEVHYTYEVHVSQMKKPSTTTSNALSCDLGVDRLVSCVTNTGDAFLIDGKKLKSINQYFNKMVRNLQQKNIENGISKRVVTNKMAALWHKRERQINGYISQTVGLLFKKVKECSIDTVVVGYNAGWKQKSDMGKKNNQKFVQIPFHKLIAAIENKCIKEGIRFLKQEESYTSKASFLDKDPVPVWTKDDKTYYHFSGKRMTRGLYQCKIGTCIHADINGALNTLKKSKVIELEENLKVKTPILLEVQTRKAVASRIA

SEQ ID NO: 5504 - protein, 447 aa, unidentified
MARKKAMKVLRKQKKRENMQRFTQKQNIGRACLTAKEFRLLQRMSHSSKALRNVGLYTMKQSYLNHNKMATVKEVDTAMQADMNYWGIQSNSVQAIRRALYAEVKSFFKAWEQWKKKPETFTGRPKFPNYSRSTDKRIIEIYQVPKVDDNGYWMIPMNVAFRKKFGSIKIRMPKNLRNKKISYIEIVPKQKGRFFEVHYTYEIHVSQMKKPSTTTSNALSCDLGVDRLLSCVTNTGDTFLIDGKKLKSINQYFNKMIRNLQQKNMDNGISKRIVTNQMAALWHKRERQINGYISQTVGLLFKKVKACNIDTIVVGYNVGWKQKSDMGKKNNQKFVQIPFHKLIVAIENKCIKEGIRFFKQEESYTSKASFLDKDPVPVWSKDERTHYHFSGKRMTRGLYQSKAGTCIHADINGALNTLQKSRVVELHENLKVKTPILLEVQKRKAVA

SEQ ID NO: 5505 - protein, 451 aa, unidentified
MARKKAVKVLRKQKKRETMQRFTQKQNIGRACLTAKEFRLLQRMSHSSKALRNVGLYTIKQSYLNNNKIATVKEVDTAMQADLNYWGMQSNSVQAIRRALFTEVKSFFKALEQWKKKPEAFTGRPKFPNYSRSTDKRIIEIYQVPKVDENGYWIIPMSVAFRKKFGSIKIRMPKNLRNKKISYIEIVPKQKGRFFEVHYTYEMHVSQMKKQSTTTSNALSCDLGVDRLVSCATNTGDTFLIDGKKLKSINQYFNKMICNLQQKNIDNGISKRIVTNQMAALWHKRERQINGYISQTIGLLFKKVKALGIDTVVVGYNVGWKQKSDMGKKNNQKFVQIPFHKLIAAIENKCIKEGIRFFKQEESYTSKASFLDKDPVPVWSKDERTHYHFSGKRITRGLYQSKAGTCIHADINGALNTLEKSRVVELDDNLKVKTPILLEVQKRKAVASRIA

SEQ ID NO: 5506 - protein, 451 aa, unidentified
MAKKKAVKVLRKQKKRETIQRFTQKQNIGRACLTAKEFRLLQRMSHSSKALRNVGLYTIKQSYLNNNKMATVKEVDTAMQADMNYSGVQSNSVQAIRRALFTEVKSFFKALEQWKKKPETFTGRPKFPNYSRSTDKRIIEIYQVPKVDDNGYWMIPMNVAFRKKFGSIKIRMPKNLRNKKISYIEIVPKQKGRFFEVHYTYEMHVSQMKKPPTTTSNALSCDLGVDRLVSCVTNTGDTFLIDGKKLKSINQYFNKMIRNLQQKNMENGISKRIVTNKIAALWHKRERQINGYISQTVGLLFKKVKAFDIDTIVVGYNTGWKQKSDMGKKNNQKFVQIPFHKLIAAIENKCVKEGIRFLKQEESYTSKASFLDKDRVPVWSKDDRTQYRFSGKRTTRGLYQSKAGTCIHADINGALNTLQKSKVVELDDNLKVKTPILLEVQKRKAVASRIA

SEQ ID NO: 5507 - protein, 451 aa, unidentified
MTRKKAVKVLRKQKKRENMQRFTQKQNIGRACLTAKEFRLLQRMSHSSKALRNVGLYTIKQSYLNDNKMATIKEVDTAMQADTNYWGMQSNSVQAIRRTLFTEVKSFFKALEQWKKNPEKFTGRPKFPNYSRSTDKRIVEIYQVPKVDDNGYWMIPMNVAFRKKFGSIKIRMPKNLKNKKISYIEIVPKQKGRFFEVHYTYEMHVSQMKKLSMTTSNALSCDLGVDRLVSCVTNTGDAFLIDGKKLKSINQYFNKMIRNLQLKNVENGLSKRVVTNKTAALWHKRERQINGYISQTVGLLFKKVKAFGIDTVVVGYNAGWKQKSDMGKKNNQRFVQIPFHKLMAAIENKCVKEGIRFLKQEESYTSKASFLDKDRVPVWSKDDRTQYRFSGKRMTRGLYQSKAGTCIHADINGALNTLEKSRIVELDDNLKVKTPILLEVQKRKAVASRIA

SEQ ID NO: 5508 - protein, 451 aa, unidentified
MTRKKAVKVLRKQKKRETMQRFTQKQNIGRACLTAKEVRLLQRMSHSSKALRNVGLYTMKQSYLNHNKMATVKEVDTTMQADMNYWGIQSNSVQAIRRALYAEVKSFFKAMEKWKKNPEKFTGRPKFPNYSRSTDKRIIEIYQVPKVDDNGYWMIPMSVAFRKKFGSIKIRMPKNLRNKNISYIEIVPKQKGRFFEVHYTYEMHVSQMKKQSATTSNALSCDLGVDRLVSCVTNTGDTFLIAGKKLKSINQYFNKMIRNLQQKNIENGLSKRVVTNQMAALWHKRERQINGYISQTVGLLFKKVKAFGIDTIVVGYNVGWKQRSDMGKKNNQTFVQIPFHKLIAAIENKCIKEGIRFLKQEESYTSKASFLDKDPVPVWSKDDKTYYRFSGKRITRGLYKSKAGTCIHADINGALNTLKKSRVVELDESLKVKTPILLEVQKRKAVASRIA

SEQ ID NO: 5509 - protein, 451 aa, unidentified
MARKKAVKVLRKQKKRETMQRFTQKQNIGRACLTAKEFRLLQRMSHSSKALRNVGLYTIKQSYLNHNKMATIKEVDTAMQADMNYCGMQSNSVQAIRRALFTEVKSFFKALEQWKKNPEKFTGRPKFPNYSRSTDKRIIEIYQVPKVDDNGYWIIPMNVAFRKKFGSIKIRMPKNLRNKKISYIEIVPKQKGRFFEVHYTYEMHVSQMKKAPTTTSNALSCDLGVDRLVSCVTNTGEAFLIDGKKLKSINQYFNKMIRNLQQKNVENGISKRVVTNRMAAIWHKRERQINGYISQTVGLLFKKVKAFDIDTIVVGYNTGWKQKSDMGKKNNQKFVQIPFHKLIAAIENKCIKEGIRLFKQEESYTSKASFLDKDLVPVWSKDDRTHYRFSGKRITRGLYKSKEGTCIHADINGALNTLQKSRVVELDDNLKVKTPILIEVQKRKAVASRIA

SEQ ID NO: 5510 - protein, 451 aa, unidentified
MARKKAVKVLRKQKKRETMQRFTQKQNIGRACLTAKEFRLLQRMSHSSKALRNVGLYTIKQSYLNHNKMATIKEVDTAMQADMNYCGMQSNSVQAIRRALFTEVKSFFKALEQWKKNPEKFTGRPKFPNYSRSTDKRIIEIYQVPKVDDNGYWIIPMNVAFRKKFGSIKIRMPKNLRNKKISYIEIVPKQKGRFFEVHYTYEMHVSQMKKPPTTTSNALSCDLGVDRLVSCVTNTGEAFLIDGKKLKSINQYFNKMIRNLQQKNVENGISKRVVTNRMAAIWHKRERQINGYISQTVGLLFKKVKAFDIDTIVVGYNTGWKQKSDMGKKNNQKFVQIPFHKLIAAIENKCIKEGIRLFKQEESYTSKASFLDKDLVPVWSKDDRTHYRFSGKRITRGLYKSKEGTCIHADINGALNTLQKSRVVELDDNLKVKTPILIEVQKRKAVASRIA

SEQ ID NO: 5511 - protein, 451 aa, unidentified
MARKKAVKVLRKQKKRENMQRFTQKQNIGRACLTAKEFRLLQRMSHSSKALRNVGLYTMKQSYLNNNKMATVKEVDTAMQADMNYWGMQSNSVQAIRRALFTEVKSFFKAMEQWQKNPEKFTGRPKFPNYSRSTDKRIIEIYQVPKVDDNGYWMIPMSVAFRQKFGSIKIRMPKNLRHKKISYIEIVPKQKGRFFEVRYTYEMHVSQMKKQSTTTSNALSCDLGVDRLVSCVTNTGDTFLIDGKKLKSINQYFNKMICNLQQKNIENGISKRVVTNRMAALWHKRERQINGYISQTVGLLFKKVKAFGIDTIVVGYNVGWKQKSDMGKKNNQKFVQIPFHKLIVAIENKCIKEGIRFFKQEESYTSKASFLDKDPVPVWSKDERTHYHFSGKRMTRGLYQSKAGTCIHADINGALNTLQKSRVVELHENLKVKTPILLEVQKRKAVASRIA

SEQ ID NO: 5512 - protein, 451 aa, unidentified
MARKKAVKVLRKQKKRENIQRFTQKQNIGRACLTAKEFRLLQRMSHSSKALRNVGLYTMKQSYLNNKKIATVKEVDTAMQADMNYWCMQSNSVQAIRRALYVEVKSFFKALEKWKKNPEKFTGRPKFPNYSRSTDKRIIEIYQVPKVDDNGYWMIPMNVAFRKKFGSIKIRMPKNLRNKKISYIEIVPKQKGRFFEVHYTYEVHVSQMKKPSTTTSNALSCDLGVDRLVSCVTNTGDAFLIDGKKLKSINQYFNKMVRNLQQKNIENGISKRVVTNKMAALWHKRERQINGYISQTVGLLFKKVKECSIDTVVVGYNAGWKQKSDMGKKNNQKFVQISFHKLIAAIENKCIKEGIRFLKQEESYTSKASFLDKDPVPVWTKDDKTYYHFSGKRMTRGLYQCKIGTCIHADINGALNTLKKSKVIELEENLKVKTPILLEVQTRKAVASRIA

SEQ ID NO: 5513 - protein, 451 aa, unidentified
MARKKAVKVLRKQKKRETMQRFTQKQNIGRACLSAKEFRLLQRMSHSSKALRNVGLYTMKQSYLNHNKMATVKEVDTAMQADMNYWGMQSNSVQAIRRTLFTEVTSFFKALEQWKKNPEKFTGRPKFPNYSRSTDKRIIEIYQVPKVDENGYWMIPMNVAFRKKFGSIQIRMPKNVRNKKISYIEIVPKQKGRFFEVHYTYEMHISQMKKPSTTTSNALSCDLGVDRLVSCVTNTGVTFLIDGKKLKSINQYFNKMIRNLQLKNVENGLSKRIVTNKMAALWHKRERQISGYISQTVGLLFQKVKAFGIDTVVVGYNTGWKQKSDMGKKNNQTFVQIPFHTLIAAIENKCLKEGIRFLKQEESYTSKASFLDQDRVPVWSKDDRTQYRFSGKRITRGLYQSKAGTCIHADINGALNTLQKSKVVEWNDNLKVKTPILLEVQKRKAVASRIA

SEQ ID NO: 5514 - protein, 451 aa, unidentified
MARKKAVKVLRKQKKRENIQRFTQKQNIGRACLTAKEFRLLQHMSHSSKALRNVGLYTMKQSYLNHNKMATVKEVDTAMQADMNYWGMQSNSVQAIRRALYTEVKSFFKALEQWKENPEKFTGRPKFPNYSFATDKRIIEIYQVPKVDENGYWMIPMNVAFRKKFGSIKIRMPKNVRHKKISYIEIVPKQKGRFFEVHYTYEMHVSQMKKQSTTTSNALSCDLGVDRLVSCVTNTGDTFLIDGKKLKSINQYFNKMIRNLQLKNVENGLSKRVVTNQMAALWHKRERQINGYISQTVGLLFKKVKTCNVDTVVVGYNAGWKQKSDMGKKNNQNFVQIPFHKLIAAIENKCIKEGIRFLKQEESYTSKASFLDKDPVPVWTKDDKTYYHFSGKRMTRGLYQCKIGTCIHADINGALNTLKKSKVIELEENLKVKTPILLEVQTRKAVASRIA

SEQ ID NO: 5515 - protein, 451 aa, unidentified
MARKKAVKVLRKQKKRETMQRFTQKQNIGGACLTAKEFRLLQRMSHSSKALRNVGLYTIKQSYLTHNKMATVKEVDNAMQADMNYWGVQSNSVQAVRRALFTEVKSFFKALEQWKKNPEKFTGRPKFPNYSRSTDKRIIEIYQVPKVDENGYWIIPMNVAFRKKFGSIKIRMPKNLRNKKISYIEIVPKQKGRFFEVHYTYEMHVSQMKKPPTTTSNALSCDLGVDRLVSCVTNIGDTFLIDGKKLKSINQYFNKMIRNLQQENMDNGISKRIVTNQMAALWHKRERQINGYISQAVGLLFKKVKACNVDTIVVGYNAGWKQKSDMGKKNNQTFVQIPFHKLMAAIENKCVKEGIRFLKQEESYTSKASFLDKDPVPVWSKDDRTHYRFSGKRITRGLYQSKAGTCIHADINGALNTLEKSKVVELDDNLKVKTPILLEVQKRKAVASRIA

SEQ ID NO: 5516 - protein, 451 aa, unidentified
MARKKAVKVLRKQKKRENMQRFTQKQNIGRACLTAKEFHLLQRMSHSSKALRNVGLYTMKQSYLNDNKMATVKEVDTAMQADTNYWGIQSNSVQAIRRALYAEVKSFFKALEQWKKNPEKFTGRPKFPNYSRSTDKRIIEIYQVPKVDENGYWIIPMNVAFRKKFGSIQIRMPKNLRNKNISYIEIVPKQKGRFFEVHYTYEMHVSQMKKPPATTSNALSCDLGVDRLLSCVTNTGDAFLIDGKKLKSINQYFNKMICNLGQKNMDNGISKRIITNKMAALWHKRERQINGYIAQTVGLLFKKVKKFDIDTIVIGYNAGWKQKSHMGKKNNQKFVQIPFQKLIAAIENKCVKEGIRFFKQEESYTSKASFLDKDPVPVWSKDDKTQYRFSGKRITRGLYQSKAGTCIHADINGALNTLKKSKIVELDENLKVKTPILLEVQKRKAVTSRIA

SEQ ID NO: 5517 - protein, 451 aa, unidentified
MAKKKAVKVLRKQKKRETLRRFTQKQNIGRACLTAQEFRLLQRMSHSSKALRNVGLYTMKQSYLNHNKMATVKEVDTAMQADMNYWGIQSNSVQAIRRALFTEVKSFFKALEQWKKNPEKFTGRPKFPNYSHSTDKRIIEIYQVPKVDENGFWMIPMSVAFRKKFGSIQIRMPKNLRNKNISYIEIVPKQKGRFFEVHYTYEMHVSQMKQQSMTTSNALSCDLGVDRLVSCVTNTGDAFLIDGKKLKSINQYFNKMICNLQQKNMDNGISKRIVTNKMAALWHKRERQINGYIAQTVGLLFKKVKESDIDTIVVGYNAGWKQNSHMGKKNNQKFVQIPFHKLIAAIENKCIKEGIRFFKQEESYTSKASFLDKDPVPVWSKDNRAQYYFSGKRITRGLYQSKAGTCIHADINGALNTLQKSQVVELDGNLKVKTPILLEVQKRKAVASRIA

SEQ ID NO: 5518 - protein, 451 aa, unidentified
MARKKAVKVLRKQKKRETMQRFTQKQNIGRACLSAKEFRLLQRMSHSSKALRNVGLYTMKQSYLNHNKMATVKEVDTAMQADMNYWGMQSNSVQAIRRTLFTEVTSFFKALEQWKKNPEKFTGRPKFPNYSRSTDKRIIEIYQVPKVDENGYWMIPMNVAFRKKFGSIQIRMPKNVRNKKISYIEIVPKQKGRFFEVHYTYEMHISQMKKPSTTTSNALSCDLGVDRLVSCVTNTGVTFLIDGKKLKSINQYFNKMIRNLQLKNVENGLSKRIVTNKMAALWHKRGRQISGYISQTVGLLFQKVKAFGIDTVVVGYNTGWKQKSDMGKKNNQTFVQIPFHTLIAAIENKCLKEGIRFLKQEESYTSKASFLDQDRVPVWSKDDRTQYRFSGKRITRGLYQSKAGTCIHADINGALNTLQKSKVVEWNDNLKVKTPILLEVQKRKAVASRIA

SEQ ID NO: 5519 - protein, 451 aa, unidentified
MARKKAVKVLRKQKKRETMQRFTQKQNIGRACLSAKEFRLLQRMSHSSKALRNVGLYTMKQSYLNHNKMATVKEVDTAMQADMNYWGMQSNSVQAIRRTLFTEVTSFFKALEQWKKNPEKFTGRPKFPNYSRSTDKRIIEIYQVPKVDENGYWMIPMNVAFRKKFGSIQIRMPKNVRNKKISYIEIVPKQKGRFFEVHYTYEMHISQMKKPSTTTSNALSCDLGVDRLVSCVTNTGVTFLIDGKKLKSINQYFNKMIRNLQLKNVENGLSKRIVTNKMAALWHKRERQISGYISQTVGLLFQKVKAFGIDTVVVGYNTGWKQKSDMGKKNNQTFVQIPFHTLIAAIENKCLKEGIRFLKQEESYTSKASFLDQDRVPVWSKDDRTQYRFSGKRITRGLYQSKAGTCIYADINGALNTLQKSKVVEWNDNLKVKTPILLEVQKRKAVASRIA

SEQ ID NO: 5520 - protein, 451 aa, unidentified
MARKKAVKVLRKQKKRENMQRFTQKQNIGRACLTAKEFRLLQRMSHSSKALRNVGLYTIKQSYLNNNKIATVKEVDTAMQADMNYWGIQSNSVQAIRRALFTEVKSFFKALEQWKKNPEKFTGRPKFPNYSRATDKRIIEIYQVPKVDENGYWIIPMNIAFRKKFASIRIRMPKNIRNKKISYIEIVPKQKGRFFEVHYTYEMHISQMKKQSTTTSNALSCDLGVDRLVSCVTNTGDTFLIDGKKLKSINQYFNKMIRNLQLKNMENGISKRVVTNRMAALWHKRERQINGYISQTAGLLFKKVKAFDIDTIVVGYNAGWKQKSDMGKKNNQTFVQIPFHKLMAAIENKCVKEGIRFLKQEESYTSKASFLDKDKVPVWSKDDRAQYRFSGKRITRGLYQSKSGRCIHADINGALNTLQKSRVVELDDNLKVKTPILLEVQKRKAVASCIA

SEQ ID NO: 5521 - protein, 451 aa, unidentified
MARKKAVKVLRKQKKRENMQRFTQKQNIGRACLTAKEFQLLQRMSHSSKALRNVGLYTMKQSYLNDNKMATVKEVDTAMQADTNYWGIQSNSVQAIRRALYAEVKSFFKALEQWKKNPEKFTGRPKFPNYSRSTDKRIIEIYQVPKVDENGYWIIPMNVAFRKKFGSIQIRMPKNLRNKNISYIEIVPKQKGRFFEVHYTYEMHVSQMKKPPATTSNALSCDLGVDRLLSCVTNTGDAFLIDGKKLKSINQYFNKMICNLGQKNMDNGISKRIVTNKMAALWHKRERQINGYIAQTVGLLFKKVKKFDIDTIVIGYNAGWKQKSHMGKKNNQKFVQIPFQKLIAAIENKCVKEGIRFFKQEESYTSKASFLDKDPVPVWSKDDKTQYRFSGKRITRGLYQSKAGTCIHADINGALNTLKKSKIVELDENLKVKTPILLEVQKRKAVTSRIA

SEQ ID NO: 5522 - protein, 451 aa, unidentified
MAKKKAVKVLRKQKKRETLRRFTQKQNIGRACLTAQEFRLLQRMSHSSKALRNVGLYTMKQSYLNHNKMATVKEVDTAMQADMNYWGIQSNSVQAIRRALFTEVKSFFKALEQWKKNPEKFTGRPKFPNYSHSTDKRIIEIYQVPKVDENGFWMIPMSVAFRKKFGSIQIRMPKNLRNKNISYIEIVPKQKGRFFEVHYTYEMHVSQMKQQSTTTSNALSCDLGVDRLVSCVTNTGDAFLIDGKKLKSINQYFNKMICNLQQKNMDNGISKRIVTNKMAALWHKRERQINGYIAQTVGLLFKKVKESDIDTIVVGYNAGWKQNSHMGKKNNQKFVQIPFHKLIAAIENKCIKEGIQFFKQEESYTSKASFLDKDPVPVWSKDNRAQYYFSGKRITRGLYQSKAGTCIHADINGALNTLQKSQVVELDGNLKVKTPILLEVQKRKAVASRIA

SEQ ID NO: 5523 - protein, 452 aa, unidentified
MARKKAVKVLRKQKKRETMQRFTQKQNIGRACLTAKEFRLLQRMSHSSKALRNVGLYTMKQSYLNNNRMATVKEVDTAMQADTNYSGVQSNSVQAIRRAVFTEVKSFFKALEQWKKHPEKFTGRPKFPNYSRSTDKRIIEIYQVPKVDENGYWIIPMNVAFRKKFGSIKIRMPKNLRNKKISYIEIIPKQKGRFFEVHYTYEMHVSQVKKPPTTTSNALSCDLGVDRLVSCVTNTGDAFLIDGKKLKSINQYFNKMIRNLGRKNMDNGISKRIVTNQMAVLWHKRERQINGYISQTVGLLFKKVRACNVDTIVVGYNAGWKQKSDMGKKNNQTFVQIPFHKLMAAIENKCIKEGIRFVKQEESYTSKASFLDKDPVPVWSKDGKTHYCFSGKRITRGLYQQSKAGTCIHADINGALNTLKKSKVVELDGNLKVKTPILLEVQKRKAVASRIA

SEQ ID NO: 5524 - protein, 451 aa, unidentified
MAKKKAVKVLRKQKKRENMQRFTQKQNIGRACLTAKEFRLLQRMSHSSKALRNVGLYTIKQSYLNDNKMATVKEVDTAMQADMNYWGMQSNSVQAIRRALFTEVKSFFKALEQWKKKPETFTGRPKFPNYSRSTDKRIIEIYQVPKVDENGYWMIPMNVAFRKKFGSIKIRMPKNLRNKKISYIEIVPKQKGRFFEVHYTYEMHVPQMKRQSTTTSNALSCDLGVDRLVSCVTNTGDTFLIDGKKLKSINQYFNKMIRNLQLKNMENGLSKRVVTNKMAALWHKRERQINGYISQTVGLLFKKVKACNIDTVVVGYNAGWKQKSDMGKKNNQTFVQIPFHKLIAAIENKCVKEGIRFLKQEESYTSKASFFDKDRIPVWSKDDGTHYRFSGKRITRGLYQSKAGTCIHADINGALNTLQKSKVVELDDNLKVKTPILLEVQKRKAVASRIA

SEQ ID NO: 5525 - protein, 451 aa, unidentified
MVRKKAVKVLRKQKKRENMQRFTQKQNIGRACLTAKEFRLLQRMSHSSKALRNVGLYTIKQSYLNDNKMATVKEVDTAMQADTNYSGIQPNSVQAIRRALFTEVKSFFKAMEQWKKNPEKFTGRPKFPNYSRSTDKRIIEIYQVPKVDENGYWMIPMNVAFRKKFGSIKIRMPKNLRNKKISYIEIVPKQKGRFFEVHYTYETHVSQMKKPSTTTSNALSCDLGVDRLLSCVTNTGDTFLIDGKKLKSINQYFNKMIRNLQQKNMDNGISKRIVTNQMAALWHKRERQINGYISQAVGLLFKKVKACNVDTIVVGYNAGWKQKSDMGKKNNQTFVQIPFHKLMAAIENKCVKEGIRFLKQEESYTSKASFLDKDPVPVWSKDDRTHYRFSGKRITRGLYQSKAGTCIHADINGALNTLEKSKVVELDDNLKVKTPILLEVQKRKAVASRIA

SEQ ID NO: 5526 - protein, 451 aa, unidentified
MARKKAVKVLRKQKKREIIQRFTQKQNIGRACLTAKDFRLLQRMSHSSKALRNVGLYTIKQSYLNHNKMATIKEVDTAMQADMNYWGIQSNSVQAIRRALFTEVKSFFKALEQWKKKPEKFTGRPKFPNYSRSTDKRIIEIYQVPKVDDNGYWMIPMNVAFRKKFGSIKIRMPKNVRNKKISYIEIVPKQKGRFFEVHYTYEMHISQMKKPSTTTSNALSCDLGVDRLVSCVTNTGDTFLIDGKKLKSINQYFNKMIRNLQQKNMDNGISNRIVTNKMAALWHKRERQINGYISQTVGLLFKEVKAYNIDTIVIGYNTGWKQKSHIGKKNNQTFAQIPFHKLIAAIKNKCVKEGIRFLKQEESYTSKASFLDKDPVPVWSKDDSTHYRFSGKRITRGLYQSKVGTCIHADINGALNTLEKSRVVEWDDNLRVKTPILLEVQKRKAVASCIA

SEQ ID NO: 5527 - protein, 451 aa, unidentified
MAKKKAVKVLRKQKKRETLQRFTQKQNIGRACLTAKEFRLLQRMSHSSKALRNVGLYTMKQSYLNHNRMATVKEVDTAMQADMNYWGMQSNSVQAIRRALYAEVKSFFKAMEQWKKNPEKFTGRPKFPNYSRSTDKRIIEIYQVPKVDENGYWMIPLNVAFRKKFGSIKIRMPKNIRNKKISYIEIVPKQKGRFFEVHYTYEMHVSQMKQQSTTTSNALSCDLGVDRLVSCVTNTGDAFLIDGKKLKSINQYFNKMICNLQQKNLENGISKRVVTNTMAVLWHKRERQINGYISQTVGLLFKKVKAFGIDTIVVGYNVGWKQKSDMGKKNNQKFVQIPFHKLLAAIENKCIKEGIRFLKQEESYTSKASFLDKDPVPVWSKGDRSHYRFSGKRITRGLYRSQSGTCIHADINGALNTLQKSKVVELDESLKVKTPILLEVQKRKAVASRIA

SEQ ID NO: 5528 - protein, 451 aa, unidentified
MSRKKAVKVLRKQKKRETMRRFTQKQNIGRACLTAKEFRLLQRMSHSSKALRNVGLYTMKQSYLNNKKMATVKEVDTAMQADMNYWGMQSNSVQAIRRALLTEVKSFFKALEQWKKKPETFTGRPKFPNYSRSTDKRIIEIYQVPKVDDNGYWMIPMNVAFRKKFGSIKIRMPKNLRNKKISYIEIVPKQKGRFFEVHYTYEMHVSQMKQQSTTTSNALSCDLGVDRLVSCVTNTGDAFLIDGKKLKSINQYFNKMIRNLQQKNMENGLSKRVVTNKMAALWHKRERQINGYISQTVGLLFKKVKACNIDTVVVGYNAGWKQKSHMGKKNNQKFVQIPFHKLIAAIENKCVKEGIRFLKQEESYTSKASFLDKDPVPTWSKDDGTQYRFSGKRITRGLYQSKSGTCIHADINGALNTLEKSRVVELDDNLKVKTPILLEVQKRKAVASRIA

SEQ ID NO: 5529 - protein, 451 aa, unidentified
MARKKAVKVLRKQKKRENMQRFTQKQNIGRACLTAKEFRLLQRISHSSKALRNVGLYTMKQSYLNNNKMATVKEVDTAMQADMNYSGMQSNSVQAIRRALFTEVKSFFKAWEQWKKNPEKFTGRPKFPNYSRSTDKRSIEIYQVPKVDDNGFWMIPMNVAFRKKFGSIKIRMPKNLRNKKISYIEIVPKQKGRFLEVHYTYEMHVSQMKKPSTTTSNALSCDLGVDRLVSCVTNTGNTFLIDGKKLKSINQYFNKMIRNLQQKNMDNGISKRIVTNQMAALWHKRERQINGYISQTVGLLFKKVKACNIDTVVVGYNAGWKQKSDMGKKNNQTFVQIPFHKLMAAIENKCVKEGIRFLKQEESYTSKASFLDKDPVPVWSEDDRIHYRFSGKRITRGLYQSKAGTCIHADINGALNTLQKSRVVQLDDTLKVKTPILLEVQKRKAVASRIA

SEQ ID NO: 5530 - protein, 451 aa, unidentified
MAKKKAVKVLRKQKKRETLRRFTQKQNIGRACLTAQEFRLLQRMSHSSKALRNVGLYTMKQSYLNYNKMATVKEVDTAMQADMNYWGIQSNSVQAIRRALFTEVKSFFKALEQWKKNPEKFTGRPKFPDYSHSTDKRIIEIYQVPKVDENGFWMIPMSVAFRKKFGSIKIRMPKNLRNKNISYIEIVPKQKGRFFEVHYTYEMHVSQMKKQPMTTSNALGCDLGVDRLVSCVTNTGDAFLIDGKKLKSINQYFNKTIRNLQQKNVENGLSKRIVTNKIAALWHKRERQIHGYIAQTVGLLFKKVKEFDIDTIVVGYNAGWKQNSHMGKKNNQKFVQIPFHKLIAAIENKCIKEGIRFFKQEESYTSKASFLDKDPVPVWSKDDRTQYRFSGKRITRGLYQSKAGTCIHADINGALNTLQKSQVVELDGNLKVKTPILLEVQKRKAVASRIA

SEQ ID NO: 5531 - protein, 451 aa, unidentified
MARKKAVKVLRKQKKRENMQRFTQKQNIGRACLTAKEFRLLQRISHSSKALRNVGLYTMKQSYLNNNKMATVKEVDTAMQADMNYSGMQSNSVQAIRRALFTEVKSFFKAWEQWKKNPEKFTGRPKFPNYSRSTDKRSIEIYQVPKVDDNGFWMIPMNVAFRKKFGSIKIRMPKNLRNKKISYIEIVPKQKGRFLEVHYTYEMHVSQMKKPSTTTSNALSCDLGVDRLVSCVTNTGNTFLIDGKKLKSINQYFNKMIRNLQQKNMDNGISKRIVTNQMAALWHKRERQINGYISQTVGLLFKKVKACNIDMVVVGYNAGWKQKSDMGKKNNQTFVQIPFHKLMAAIENKCVKEGIRFLKQEESYTSKASFLDKDPVPVWSEDDRIHYRFSGKRITRGLYQSKAGTCIHADINGALNTLQKSRVVQLDDTLKVKTPILLEVQKRKAVASRIA

SEQ ID NO: 5532 - protein, 451 aa, unidentified
MARKKAVKVLRKQKKRETIQRFTQKQNIGRACLTAKEFRLLQRMSHSSKALRNVGLYTIKQSYLNDNKMATVKEVDTAMQADMNYWGIQSNSVQAIRRALFTEVKSFFKALEQWKKNPEKFTGRPKFPNYARSTDKRIIEIYQVPKVDENGYWMIPMNVAFRKKFGSIKIRMPKNLRHKKISYIEIVPKQKGRFFEVHYTYEMHVSQMKKPSTTTSNALSCDLGVDRLVSCVTNTGDAFLIDGKKLKSINQYFNKMIRNLQQKNIENGLSKRVVTNKMAALWHKRERQINGYISQTIGLLFKKVKECNIDTVVVGYNAGWKQKSDMGKKNNQKFVQIPFHKLMAAIESKCIKEGIRFLKQEESYTSKASFLDKDLVPVWSKDDRTQYRFSGKRITRGLYQSKAGTCIHADINGALNTLQKSKVVELDDNLKVKTPILLEVQKRKAVASRIA

SEQ ID NO: 5533 - protein, 451 aa, unidentified
MTRKKAVKVLRKQKKRETMQRFTQKQNIGRACLTAKEFRLLQRMSHSSKALRNVGLYTMKQSYLNHNKMATVKEVDTAMQADMNYWGIQSNSVQAIRRALYAEVKSFFKAMEKWKKNPEKFTGRPKFPNYSRSTDKRIIEIYQVPKVDDNGHWMIPMSVAFRKKFGSIKIRMPKNVRNKKISYIEIVPKQKGRFFEVHYTYEMHVSQMKKQSATTSNALSCDLGVDRLVSCVTNTGDTFLIAGKKLKSINQYFNKMIRNLQQKNIENGLSKRVVTNQMAALWHKRERQINGYISQTVGLLFKKVKAFGIDTIVVGYNVGWKQRSDMGKKNNQTFVQIPFHKLIAAIENKCIKEGIRFLKQEESYTSKASFLDKDPVPVWSKDDKTYYRFSGKRITRGLYKSKAGTCIHADINGALNTLKKSRVVELDESLKVKTPILLEVQKRKAVASRIA

SEQ ID NO: 5534 - protein, 451 aa, unidentified
MTRKKAVKVLRKQKKRETMQRFTQKQNIGRACLTAKEFRLLQRMSHSSKALRNVGLYTMKQSYLNHNKMATVKEVDTAMQADMNYWGIQSNSVQAIRRALYAEVKSFFKAMEKWKKNPEKFTGRPKFPNYSRPTDKRIIEIYQVPKVDDNGYWMIPMSVAFRKKFGSIKIRMPKNVRNKKISYIEIVPKQKGRFFEVHYTYEMHVSQMKKQSATTSNALSCDLGVDRLVSCVTNTGDTFLIAGKKLKSINQYFNKMIRNLQQKNIENGLSKRVVTNQTAALWHKRERQINGYISQTVGLLFKKVKAFGIDTIVVGYNVGWKQRSDMGKKNNQTLVQIPFHELIAAIENKCIKEGIRFLKQEESYTSKASFLDKDPVPVWSKDDKTYYRFSGKRITRGLYKSKAGTCIHADINGALNTLKKSRVVELDESLKVKTPILLEVQKRKAVASRIA

SEQ ID NO: 5535 - protein, 451 aa, unidentified
MARKKAVKVLRKQKKRENMQRFTQKQNIGRACLTAKEFRLLQRMSHSSKALRNVGLYTMKQSYLNNNKMATIKEVDTAMQADMNYSGMQSNSVQAIRRALFTEVKSFFKAWEQWKKNPEKFTGRPKFPNYSRSTDKRIIEIYQVPKVDDNGFWMIPMNVAFRKKFRSIKIRMPKNLRNKKISYIEIVPKQKGRFFEVHYTYEMHVSQMKKPSTTTSNALSCDLGVDRLVSCVTNTGDTFLIDGKKLKSINQYFNKMIRNLQQKNMDNGISKRIVTNQMAALWHKRERQINGYISQTVGLLFKKLKACNIDTVVVGYNAGWKQKSDMGKKNNQTFVQIPFHKLMAAIENKCVKEGIRFLKQEESYTSKASFLDKDPVPVWSEDDRIHYRFSGKRITRGLYQSKAGTCIHADINGALNTLQKSRVVQLDDTLKVKTPILLEVQKRKAVASRIA

SEQ ID NO: 5536 - protein, 451 aa, unidentified
MARKKAVKVLRKQKKRETMQRFTQKQNIGRACLTAKEFCLLQRMSHSSKALRNVGLYTIKQSYLTHNKMATVKEVDTAMQTDMNYWGVQSNSVQAIRRALFTEVKSFFKALEQWKKNPEKFTGRPKFPNYSRSTDKRIIEIYQVPKVDENGYWIIPMNVAFRKKFGSIRIRMPKNLRNKKISYIEIVPKQKGRFFEVHYTYEMHVSQMKKPSTTTSNALSCDLGVDRLVSCATNTGDTFLIDGKKLKSINQYFNKMIRNLQQKNMENGLSKRVVTNQMAALWHKRERQINGYISQTVGLLFKKVKACNIDTVVVGYNAGWKQKSDMGKKNNQKFVQIPFHKLVAAIENKCVKEGIRFLKQEESYTSKASFLDKDPVPVWSKDDRTQYRFSGKRITRGLYQSKAGTCIHADINGALNTLQKSRVVELDDNLKVKTPILLEVQKRKAVASRIA

SEQ ID NO: 5537 - protein, 451 aa, unidentified
MVKKKAVKVLRKQKKRENMQRFTQKQNIGRACLTAKEFRLLQRMSHSSKALRNVGLYTIKQSYLNHNKMATVKEVDTAMQTDMNYWGIQSNSVQAIRRALFTEVKSFFKAWEQWKKKPETFTGRPKFPNYSRSTDKRIIEIYQVPKVDDNGYWMIPMNVAFRKKFGSIKIRMPKNLRNKKISYIEIVPKQKGRFFEVHYTYEMHVSQMKQQSTTTSNALSCDLGVDRLVSCGTNTGDTFLIDGKKLKSMNQYFNKKIRNLQQKNIENGISKRVVTNQMASLWHKRERQINGYISQTVGLLFKQVKAFDIDTIVVGYNTGWKQKSDMGKKNNQKFVQIPFHKLIAAIENKCVKEGIRFLKQEESYTSKASFLDKDRIPVWSKDDRTQYRFSGKRITRGLYQSKAGTCIHADINGALNTLQKSKVVELNDNLKVKTPILLEVQKRKAVASCIA

SEQ ID NO: 5538 - protein, 451 aa, unidentified
MARKKAVKVLRKQKKRENMQRFTQKQNIGRACLTAKEFHLLQRMSHSSKALRNVGLYTMKQSYLNDNKMATVKEVDTAMQADTNYWGIQSNSVQAIRRALYAEVKSFFKALEQWKKNPEKFTGRPKFPNYSRSTDKRIIEIYQVPKVDENGYWIIPMNVAFRKKFGSIQIRMPKNLRNKNISYIEIVPKQKGRFFEVHYTYEMHVSQMKKPPATTSNALSCDLGVDRLLSCVTNTGDAFLIDGKKLKSINQYFNKMICNLGQKNMDNGISKRIVTNKMAALWHKRERQINGYIAQTVGLLFKKVKKLDIDTIVIGYNAGWKQKSHMGKKNNQKFVQIPFQKLIAAIENKCVKEGIRFFKQEESYTSKASFLDKDPVPVWSKDDKTQYRFSGKRITRGLYQSKAGTCIHADINGALNTLKKSKIVELDENLKVKTPILLEVQKRKAVTSRIA

SEQ ID NO: 5539 - protein, 451 aa, unidentified
MAKKKAVKVLRKQKKRETMQRFTQKQNIGRACLTAKEFRLLQRMAHSSKALRNVGLYTIKQSYLNHNKMATVKEVDTAMQVDTNYWGIQSNSVQAIRRALFTEVKSFFKALEQWKKNPETFTGRPKFPNYSRSTDKRIIEIYQVPKVDENGYWMIPMNVAFRKKFGSIKIRMPKNIRNKKISYIEIVPKQKGRFFEVHYTYEMHVSQMKQQSTTTSNALSCDLGVDRLVSCVTNTGDAFLIDGKKLKSINQYFNKMICNLQQKNLENGISKRVVTNTMAVLWHKRERQINGYISQTVGLLFKKVKAFGIDTIVVGYNVGWKQKSDMGKKNNQKFVQIPFHKLLAAIENKCIKEGIRFLKQEESYTSKASFLDKDPVPVWSKGDRSHYRFSGKRITRGLYRSQSGTCIHADINGALNTLQKSKVVELDESLKVKTPILLEVQKRKAVASRIA

SEQ ID NO: 5540 - protein, 451 aa, unidentified
MARKKAVKVLRKQKKRENMQRFTQKQNIGRACLTAKEFHLLQRMSHSSKALRNVGLYTMKQSYLNDNKMATVKEVDTAMQADTNYWGIQSNSVQAIRRALYAEVKSFFKALEQWKKNPEKFTGRPKFPNYSRSTDKRIIEIYQVPKVDENGYWIIPMNVAFRKKFGSIQIRMPKNLRNKNISYIEIVPKQKGRFFEVHYTYEMHVSQMKKPPATTSNALSCDLGVDRLLSCVTNTGDAFLIDGKKLKSINQYFNKMICNLGQKNMDNGISKRIVTNKMAALWHKRERQINGYIAQTVGLLFKKVKKLDIDTIVIGYNAGWKQKSHMGKKNNQKFVQIPFQKLIAAIENKCVKEGIRFFKQEESYTSKASFLDKDPVPVWSKDDKTQYRFSGKRITRGLYQSKAGTCIHADINGALNTLKKSKIVELDENLKVKTPILLEVQKRKVVTSRIA

SEQ ID NO: 5541 - protein, 451 aa, unidentified
MARKKAVKVLRKQKKRETMQRFTQKQNIGRACLTAKEFRLLQRMAHSSKALRNVGLYTIKQSYLNDNKMATVKEVDNAMQADMNYSGVQSNSVQAIRRALFTEMKSFFKALEQWKKHPDKFTGRPKFPNYSRSTDKRIIEIYQVPKVDENGYWIIPMNVAFRKKFGSIKIRMPKNLRNKKISYIEIVPKQKGRFFEVHYTYEMHVSQMKKQPTTTSNALSCDLGVDRLVSCVTTTGDAFLIDGKKLKSINQYFNKVIRNLQQKNMENGLSKRVVTNQMAALWHKRERQIHGYISQTVGLLFKKVKAFGIDTIVVGYNAGWKQKSDMGKKNNQKFVQIPFHKLIVAIENKCIKEGIRFVKQEESYTSKASFLDKDPVPVWSNGDKTHYLFSGKRITRGLYKSKAGTCIHADINGALNTLQKSRIVEWDDNLKVKTPILLKVQKRKAVASRIA

SEQ ID NO: 5542 - protein, 451 aa, unidentified
MARKKAVKVLRKQKKREIIQRFTQKQNIGRACLTAKDFRLLQRMSHSSKALRNVGLYTIKQSYLNHNKMATIKEVDTAMQADMNYWGIQSNSVQAIRRALFTEVKSFFKALEQWKKKPEKFTGRPKFPNYSRSTDKRIIEIYQVPKVDDNGYWMIPMNVAFRKKFGSIKIRMPKNVRNKKISYIEIVPKQKGRFFEVHYTYEMHISQMKKPSTTTSNALSCDLGVDRLVSCVTNTGDTFLIDGKKLKSINQYFNKMIRNLQQKNMDNGISNRIVTNKMAALWHKRERQINGYISQTVGLLFKEVKAYNIDTIVIGDNTGWKQKSHIGKKNNQTFAQIPFHKLIAAIENKCVKEGIRFLKQEESYTSKASFLDKDPVPVWSKDDSTHYRFSGKRITRGLYQSKVGTCIHADINGALNTLEKSRVVEWDDNLKVKTPILLEVQKRKAVASCIA

SEQ ID NO: 5543 - protein, 451 aa, unidentified
MSRKKAVKVLRKQKKRETMRRFTQKQNIGRACLTAKEFRLLQRMSHSSKALRNVGLYTMKQSYLNNKKMAPVKEVDTAMQADMNYWGMQSNSVQAIRRALYAEVKSFFKALEQWKKNSEKFTGRPKFPNYSRSTDKRIIEIYQVPKVDDNGYWMIPMNVAFRKKFGSIKIRMPKNLRNKKISYIEIVPKQKGRFFEVHYTYEMHVSQMKQQSTTTSNALSCDLGVDRLVSCVTNTGDAFLIDGKKLKSINQYFNKMIRNLQQKNMENGLSKRVVTNKMAALWHKRERQINGYISQTVGLLFKKVKAFGIDTIVVGYNVGWKQKSDMGKKNNQKFVQIPFHKLIAAIENKCVKEGIRFLKQEESYTSKASFLDKDPVPIWSKDDRTHYRFSGKRITRGLYKSKSGKCIHADINGALNTLEKSKVVELEGNLKVKTPNLLEVQKRKAVASCIA

SEQ ID NO: 5544 - protein, 451 aa, unidentified
MARKKAVKVLRKQKKRENMQRFTQKQNIGRACLTAKEFRLLQRMSHSSKALRNVGLYTMKQSYLNHNKMATVKEVDTAMQADMNYWGIQSNSVQAIRRALYAEVKSFFKALEQWKKNPEKFTGRPKFPNYSRSTDKRIIEIYQVPKVDDNGYWMIPMSVVFRKKFGSIKIRMPKNIRNKKISYIEIVPKQKGRFFEVHYTYEMHVSQMKQQSTTTSNALSCDLGVDRLLSCVTNTGDAFLIDGKKLKSINQYFNKMIRNLGRKNMDNGISKRVVTNKMAAFWHKRERQINGYISQTVGLLFKKVKAFGIDTVVVGYNTGWKQKSDMGKKNNQTFVQIPFHKLIAAIENKCIKEGIRFLKQEESYTSKASFLDKDPVPVWSKDDRTHYHFSGKRITRGLYQSKSGKCIHADINGALNTLQKSKVVQLDDNLNVKTPILLEVQKRKAVAPRIA

SEQ ID NO: 5545 - protein, 447 aa, unidentified
MARKKAVKVLRKQKKRENMQRFTQKQNIGRACLTAKEFRLLQRMSHSSKALRNVGLYMIKQSYLDHNKMATVKEVDTAMQADMNYWGMQSNSVQAIRRALFTEVKSFFKALKQWKKNPEKFTGRPKFPNYSRSTDKRIIEIYQVPKVDEKGYWMIPMNVAFRKKFGSIKIRMPKNVRNKKISYIEIVPKQKGRFFEVHYTYELHVSQMKKQSTTTSNALSCDLGVDRLVSCATNTGDTFLIEGKKLKSINQYFNKMIRNLQQKNVENGISKRVVTNKMAALWHKRERQINGYISQTVGLLFKKVKAFGIDTVVVGYNAGWKQKSDMGKKNNQKFVQIPFYKLIAAIENKCIKEGIRFFKQEESYTSKASFLDKDPVPVWSKDDKMHYLFSGKRMTRGLYQSKAGTCIHADINGALNTLQKSRVVQLDDNLKVKTPILLEVQKRKAVA

SEQ ID NO: 5546 - protein, 451 aa, unidentified
MTKKKAVKVLRKQKRRETLQRFTQKQNIGRACLTAKEFRLLQRMSHSSKALRNVGLYIIKQSYLNNNKMATVKEVDTAMQADMNYSGMQSNSVQAIRRALFTEVKSFFKAWEQWKKKPETFTGRPKFPNYSRSMDKRIIEIYQVPKVDDNGYWMIPMNVAFRKKFGSIKIRMPKNLRNKKISYIEIVPKQKGRFFEVHYTYEMHVSQMKKPSTTTSNALSCDLGVDRLLSCVTNTGDTFLIDGKKLKSINQYFNKMIRNLQQKNMDNGISKRIVTNQMAALWHKRERQINGYISQTVGLLFKKVKACNIDTVVVGYNAGWKQKSDMGKKNNQKFVQIPFHKLIVAIENKCVKEGIRFLKQEESYTSKASFLDKDSVPAWSKDDRTHYRFSGKRINRGLYQSRAGICIHADINGALNTLQKSKVVQLDDNLKVKTPILLEVQKRKAVASRIA

SEQ ID NO: 5547 - protein, 451 aa, unidentified
MARKKAVKVLRKQKKREKIQRFTQKQNIGRACLTAKEFRLLQRMSHSSKALRNVGLYTIKQSYLNHNKMATVNEVDTAMQADMNYSGIQSNSVQAIRRALFTEVKSFFKALEQWKKNPETFTGRPKFPNYSPSTDKRIIEIYQVPKVDENGYWIIPMSVAFRKKFGSIKIRMPKNVRNKKISYIEIVPKQKGRFFEVHYTYEMHVSQMKKQSATTSNALSCDLGVDRLVSCVTNTGDAFLIDGKKLKSINQYFNKMICNLQQKNMENGISKRVVTNKVAAIWHKRERQINGYISQTVGLLFKKVKAFDIDTIVVGYNTGWKQKSDMGKKNNQTFVQIPFHKLIAAIENKCVKEGIRFLKQEESYTSKASFLDKDPVPVWSKDDRTHYRFSGKRITRGLYQSKAGTCIHADINGALNTLQKSRVVELDDNLKVKTPILLEVQKRKAVASRIA

SEQ ID NO: 5548 - protein, 451 aa, unidentified
MARKKAVKVLRKQKKRENMQRFTQKQNIGRASLTAKEFRLLQRMSHSSKALRNVGLYTMKQSYLNHNRMATVKEVDTAMQNDMNYPGVQSNSVQAIRRSLFTEVKSFFKALEQWKKNPEKFTGRPKFPNYSRSTDKRIIEIYQVPKVDENGYWIIPMNVAFRKKFGSIKIRMPKNLRNKNISYIEIVPKQKGRFFEVHYTYEMHVSQMKKPSTTTSNALSCDLGVDRLVSCVTHTGDAFLIDGKKLKSINQYFNKMICNLQQKNMDNGISKRIVTNKMAALWHKRERQINGYIAQTVGLLFKKVKEFDIDTIVIGYNAGWKQKSHMGKKNNQKFVQIPFQKLIAAIENKCVKEGIRFFKQEESYTSKASFLDKDPVPVWSKDDRTQYRFSGKRITRGLYQSKAGTCIHADINGALNTLKKSKVVELDDNLKVKTPILLEVQKRKAVASRIA

SEQ ID NO: 5549 - protein, 451 aa, unidentified
MARKKAVKVLRKQKKRENMQRFTQKQNIGRACLTTKEFRLLQRMSHSSKALRNVGLYTMKQSYLNHNRMATVKEVDTAMQNDMNYPGVQSNSVQAIRRSLFTEVKSFFKALEQWKKNPEKFTGRPKFPNYSRSTDKRIIEIYQVPKVDENGYWIIPMNVAFRKKFGSIKIRMPKNLRNKNISYIEIVPKQKGRFFEVHYTYEMHVSQMKKPSTTTSNALSCDLGVDRLVSCVTHTGDAFLIDGKKLKSINQYFNKMICNLQQKNMDNGISKRIVTNKMAALWHKRERQINGYIAQTVGLLFKKVKEFDIDTIVIGYNAGWKQKSHMGKKNNQKFVQIPFQKLIAAIENKCVKEGIRFFKQEESYTSKASFLDKDPVPVWSKDDRTQYRFSGKRITRGLYQSKAGTCIHADINGALNTLKKSKVVELDDNLKVKTPILLEVQKRKAVASRIA

SEQ ID NO: 5550 - protein, 451 aa, unidentified
MARKKAVKVLRKQKKRETMQRFTQKQNIGRACLTAKEFRLLQRMSHSSKALRNVGLYTIKQSYLNDNRVATVKEVDNAMQADMNYSGVQSNSVQAIRRALFTEVKSFFKALEQWKKHPDKFTGRPKFPNYSRSTDKRIIEIYQVPKVDENGYWIIPMNVAFRKKFGSIRIRMPKSLRNKKISYIEIVPKQKGRFFEVHYTYEMHVSQMKKPSTTTSNALGCDLGVDRLVSCVTNTGDAFLIDGKKLKSINQYFNKMIGNLQQKNVENGLSKRIVTNKIAALWHKRERQIHGYIAQTVGLLFKKVKEFDIDTIVVGYNAGWKQKAHMGKKNNQTFVQIPFHKLMAAIENKCVKEGIRFLKQEESYTSKASFLDKDPVPVWAKDDKMQYHFSGKRITRGLYKSKAGICIHADINGALNTLKKSGVVELNDNLKVKTPILLEVQKRKAIASRIA

SEQ ID NO: 5551 - protein, 451 aa, unidentified
MARKKAVKVLRKQKKRETMQRFTQKQHIGRACLTAKEFRLLQRMSHSSKALRNVGLYTIKQSYLNDNKMATVKGVDNAMQADMNYSGVQSNSVQAIRRALFTEVKSFFKAMEQWKKHPEKFTGCPKFPNYSRSTDKRIIEIYQVPKVDENGYWIIPMNVAFRQKFGSIKIRMPKNLRNKKISYIEIVPKQKGRFFEVHYIYEVHMSQMKKPSTTTSNALGCDLSVDRLVSCVTNTGDAFLIDGKKLKSINQYFNKMICNLQQKNMKNGLSKRVVTNKIAALWHKRDQQINGYIAQTVGLLFKKVKEFDIDTIVVGYNAGWKQKSHMGKKNNQTFVQIPFHKLMAAIENKCVKEGIRFLKQEESYTSKASFLDKDPVPVWSKDDRTQYRFSGKRITRGLYQSKAGTCIHADINGALNTLKKSKVVELDDNLKVKTPILLEVQKRKAVASRIA

SEQ ID NO: 5552 - protein, 451 aa, unidentified
MARKKAVKVLRKQKKRENMQRFTQKQNIGRACLTAKEFRLLQRMSHNSKALRNVGLYTMKQSYLNNNRIATVKEVDTAMQADTNYWGVQSNSVQAIRRALFTEVKSFFKALEQWKKNPEKFTGRPKFPNYSRSTDKRIIEIYQVPKVDENGYWMVPMNVAFRKKFGSIQIRMPKNLRNKNISYIEIVPKQKGRFFEVHYTYEMHVSQMKKPSTTTSNALSCDLGVDRLVSCVTNTGDAFLMDGKKLKSINQYFNKTIRNLGQKNMENGLSKRVVTNRMAALWHKRERQINGYIAQTVGLLFKKVKEFDIDTIVIGYNAGWKQKSHMGKKNNQKFVQIPFQKLIAAIENKCVKEGIRFFKQEESYTSKASFLDKDPVPVWSKDDRTQYRFSGKRITRGMYQSKAGTCIHADINGALNTLKKSGVIELDDNLKVKTPILLEVQKRKAVASRIA

SEQ ID NO: 5553 - protein, 409 aa, unidentified
MTLTERHIIRPTHPIFKRIKDFCHLSKNLYNYANFILREHYFAGFKLPTAYDLINRFVKESQRDYKALPAQSAQQVLMLLSQNWKSYLKALKAYKLKPSSFLARPKIPKFKPKDGVSIGVLTNQQTSFTKGRMTKIKFPKKANLKRLITKINPQTSRLKQVRLIPKTTCFIVEVVYEQTTHKLPQTHGIGIMGIDLGLNNFVTAIDNQSSPFIIKGGGVKSVNQWFNKLKAHYQAKAKTSNKRFWTKRLGKLALWRECKINDFMHKASTYVVGHCLKKGISTIVIGKNDGWKQELKLGKRTNQNFTNIPYESFIEKLAYKSALVGITLHTTEERFTSKCDHLANEPMQHHEQYLGKRVKRGLFKSSIGKSLNADINGATGILRKVFPDAVKTLRDSAVVFTPVKISLAF

SEQ ID NO: 5554 - protein, 451 aa, unidentified
MARKKAVKVLRKQKKRENMQRFTQKQNIGRACLTAKEFRLLQRMAHSSKALRNIGLYTMKQSYLNNNRMATVKEVDAAMQADMNYSGIQSNSVQAIRRSLFTEVKSFFKAMEQWKKNPEKFTGRPKFPNYSRSTDKRIIEIYQVPKVDENGYWMIPMNVAFRKKFGSIQIRTPKNLRNKNISYIEIVPKQKGRFFEVHYTYEMHVSQMKKPPTTTSNTLSCDLGVDRLLSCVTNTGDAFLMDGKKLKSINQYFNKMICNLGQKNMDNGISKRIVTNKMAALWHKRERQINGYIAQTVGLLFKKVKEFNLDTIVVGYNAGWKQKSHMGKKNNQKFVQIPFQKLIAAIENKCVKEGIRFFKQEESYTSKASFLDKDPVPVWSKDDKTQYRFSGKRITRGLYQSKAGTCIHADMNGALNTLKKSGVVELDDNLKVKTPILLEVQKRKAVASRIA

SEQ ID NO: 5555 - protein, 451 aa, unidentified
MARKKAVKVLRKQKKRENMQRFTQKQNIGRACLTAKEFRLLQRMSHSSKALRNVGLYTMKQSYLNHNRMATVKEVDTAMQADTNYWGVQSNSVQAIRRALFTEVKSFFKALEQWKKNPEKFTGRPKFPNYSRSTDKRIIEIYQVPKVDENGYWMIPMNVAFRKKFGSIKIRMPKNLRNKNISYIEIVPKQKGRFFEVHYTYEMHVSQMKKPSTTTSNALSCDLGVDRLLSCVTNTGDAFLIDGKKLKSINQYFNKIICNLQQKNMDNGISKRIVTNKIAALWHKRERQINGYIAQALGLLFKKVKEFDIDTVVVGYNTGWKHKSHMGKKNNQKFVQIPFQKLIAAIENKCVKEGIRFFKQEESYTSKASFLDKDPVPVWSKDDKTQYRFSGKRITRGLYQSKAGTCIHADINGALNILKKSGVVELDENLKVKTQILLEVQKRKAIASRIA

SEQ ID NO: 5556 - protein, 419 aa, unidentified
MYLTQTNYIRHLPKNQYEAILEMCAYANNLYNVGLYQIRQHFFATHQYLRYEENYHLCKGNENYKLLQAGISQQILRICDRSFKSFFALISKKKSGVYDKQVHIPHYRAKGGKYLLVLSTNAINIRNGYLIIPMSRAFAKQHADLDAIRIPVPERIADKKICEIKILPVLNGKVLKIQYCYEQEAEPQNLNTDNALAIDVGLDNLASCVTTTGTPFIVDGRKLKSINQWYNKQLAHYASIKDHQRIKGFTACMSRITDKRNRQVTDYMHKAARYIVDFCIENDIGTLIVGHNVDQKQSVNMGKSSNQKFVQIPFDQLRTYLKCLCERYGIAYIETEESYTSKASFLDGDDIPVFDAKNPYAGAFSGKRVRRGLYRTKENTLINADINGACNIAKKGKQNLSIEGLCRGLLASPLRIRIA

SEQ ID NO: 5557 - protein, 413 aa, unidentified
MQLVQRHIINKNHKYWSYFDQQAFLSKNLFNLTNYQMRQHFFEKKEILSFTSLYHLVSKSDAYYALPNTKVAKQIIRRIHKAWIGYKQAHKDWKRNPSKYLGEPRIPKYKDKIKGRYAVIFPDETVSKPALRKGVVKLTPCPIEFESGLQEVDEVRVIPRSGCYVVEIVYSQEPINNSATEVAGIDLGLTNLITLTSNQPGVKPLLIKGGALKAINTYYNKQKAKIQSELENKHKAKTSNRLNKLTHKRNCRVNNYLHTSSRRVIDWCIANQVGTLIVGKNDGWKQSINIGRKNNQQFVNVPHAQLISMISYKAELLGIKVVVTEESYSSKSSILDNDPLPKYGEDKPKFSGKRVKRGLYVSKNGIRINADVQGSLNIIRKVKPNVFDYGLRGLPFSPVTLDPLRTHDFLQIA

SEQ ID NO: 5558 - protein, 426 aa, unidentified
MAKSKKVMGVQQCLLSPDKDLKSLLEYLCGESNKLHNCAVYYARQIWFKARKFVTGFDLVNEMNRNPHFRAMASEVSVQTCLAVGESITSFAALLKKSINGELEQKPRFPGYRNPGFQLIAFPKRALKLVDGKIRLPLGLQVKAWFGLKEFFLPMPSNLTFGELKEVRILPRNRCFYVEYVYPISHVQVEVDPLKVLGLDHGLNNWLTGVSNVGTSLIIDGKHLKSKNQWYNKTVARLMDEKPNGFWSNRLARITEKRNRVMRDATNKAARKVIDHCLENEIGTVVFGWNKGQKDGANMGKKNNQKFVQIPTARLKTRIQQLCERFGIQFVETEESYTSKASFVDSDFLPKYREKPEGWESSGRRVKRGLYRTGNNQYINCDCNGAANIIRKVAVMLGLDLSGISRGELSAPLKFRLWTLQESQRL

SEQ ID NO: 5559 - protein, 459 aa, unidentified
MSYQTTKLLLTGNITDQTRDILVFLCHEANRLWNTAVYQVRQAHFSTCGIREFFDQNDLLRRQFKDKKVKVSYSGLCKEFKENPHYQWLGGQQGQQVLKSVIEAFKSYNKLLEMWFNGEIDHKPKLPSYRTKGGLCEFSFPAQSLRLNYENGCWLLPMSHLIKDYWIEEEFSIPSVNYIGERNIAEVRIFPQHGKLWAELVYQVKEKQAVGLDYSQALGCDPGVKNLLTCVSTLGKSFIVDGHKIKGANAEYNKKVAKYKQGKTDFYWDEYLDELTHKRSCLMRDAINKAARLIINYCLKHRIGNIVFGWGQAVKTNCNLGSKNNQNFVQIPTARLKNRIKELAESVGIKFTETEESYTSKSSFLDCDELPVFGGEKPASWKPSGKRVKRGLYQTRNGQLINADANGAANILRKVSTQLGLGLAEVRREVLSLPKRYDVFSSLKKLYRKCGETRLNLVS

SEQ ID NO: 5560 - protein, 433 aa, unidentified
MYGCQQALIKADSETLAVLEYLCSEANKLTNCGIYYARQMLLKAGHYVSKAELDKKLKTNIHFKAMRSCCSQQVLHGVYESFKSYRKLKKKWDKGKLPNKPQLPKYRKKGGMTVVTYPASRVKQINNNKIRFSLGKQVKAWFGISYFELKTPSNLDFSNVREVRILPRNGCFYVEYVYKCSDRKAKVDTNNALGIDSGLNNWLTCVSTTGKSFIIDGRKVKSQNQWYNKCVAKLKKGKPHAYWDWELADLTEKRNRQMRDAVNKSARFVINWCLANNVGTIVFGWNKRNKDGVKLGKKNNQEFVQIPTAKLKNRIAQLCEQYGLRFIETEESYTSKASFLDDDFLPNYGAKPEQWKPSGKRTRRGEYKTNKKGSMNADCNGASNILKKVSTQLGLDLAKVSRVALTLPQRYRLDDLSKSYRNRCEDVCLQTAS

SEQ ID NO: 5561 - protein, 460 aa, unidentified
MNYQTQKILLTGNIDDEAHAYLLWCCEQSNKLYNSVLFSIRQDYFENCNYKTWFDKNDNYRRSPRLRRIKVSYAQLCKDFKDNVHYQAIGGQQGQQTIKSVVEAIKGYNKLLPMWFNGELKDKPKIPNYRKKGLYQVSFTSQNIRYEPLEGICYLPIANSQRKELETPSIIIPSGVNFQFLDIAEIRIIPQTNKLWAEYIYKTQSVKGSNLDYSQGLGIDHGVTNWLSCTTTKGKSFIVNGRKIKSINQRYNRFIAKHKQGQHQDYWDDQLEQATHKRNCQMRDAVNKAARFIINYCLKHQIGNIVFGWNDGQKNSINIGKTNNQNFAQIPTARLKNPIQQLAESVGIIFTEIDEAYSSKASFLDNDLVPNYGEKPQGYKFSGKRIKRGLYQTAKGWLVNSDTHAAANCLRKVATQLGLDLARVGKECLTVPKRYDLENLTKSYRKQAEMWLQPIESLTA

SEQ ID NO: 5562 - protein, 409 aa, unidentified
MTLTERHIIRPTHPIFKRIKDFCHLSKNLYNYANFILREHYFAGFKLPTAYDLINRFVKESQRDYKALPAQSAQQVLMLLSQNWKSYLKALKAYKLKPSSFLARPKIPKFKPKDGVSIGVLTNQQTSFTKGRMTKIKFPKKANLKRLITKINPQTSRLKQVRLIPKTTCFIVEVVYEQTTHKLPQTHGIGIMGIDLGLNNFVTAIDNQSSPFIIKGGGVKSVNQWFNKLKAHYQAKAKTSNKRFWTKRLGKLALWRECKVNDFMHKASAYVVGHCLKKGISTIVIGKNDGWKQELKLGKRTNQNFTNIPYESFIEKLAYKCALVGITLHSTEERFTSKCDHLANEPMQHHEQYLGKRVKRGLFKSSIGKSLNADINGAIGILRKVFPDAVKTLRDSGVVFTPVKISLAF

SEQ ID NO: 5563 - protein, 409 aa, unidentified
MTLTERHIIKPTHPIFKRIKDFCHLSKNLYNYANFILREHYFAGFKLPTAYDLINRFVKESQRDYKALPAQSAQQVLMLLSQNWKSYLKALKAYKLKPSSFLARPKIPKFKPKDGVSIGVLTNQQTSFTKGRMTKIKFPKKANLKRLITKINPQTSRLKQVRLIPKTTCFIVEVVYEQTTHKLPQTHGIGIMGIDLGLNNFVTAIDNQSSPFIIKGGGVKSVNQWFNKLKAHYQAKAKTSNKRFWTKRLGKLALWRECKVNDFMHKASAYVVGHCLKKGISTIVIGKNDGWKQELKLGKRTNQNFNNIPYESFIEKLAYKCALVGITLHSTEERFTSKCDHLANEPMQHHEQYLGKRVKRGLFKSSIGKSLNADINGVIGILRKVFPDAVKTLRDSGVVFTPVKISLAF

SEQ ID NO: 5564 - protein, 409 aa, unidentified
MTLTERHIIKPTHPIFKRIKDFCHLSKNLYNYANFILREHYFAGFKLPTAYDLINRFVKESQRDYKALPAQSAQQVLMLLSQNWKSYLKALKAYKLKPSSFLARPKIPKFKPKDGVSIGVLTNQQTSFTKGRMTKIKFPKKANLKRLITKINPQTSRLKQVRLIPKTTCFIVEVVYEQTTHKLPQTHGIGIMGIDLGLNNFVTAIDNQSSPFIIKGGGVKSVNQWFNKLKAHYQAKAKTSNKRFWTKRLGKLALWRECKVNDFMHKASAYVVGHCLKKGISTIVIGKNDGWKQELKLGKRTNQNFTNIPYESFIEKLAYKCALVGITLRTTEERFTSKCDHLANEPMQHHEQYLGKRVKRGLFKSSIGKSLNADINGAIGILRKVFPDAVKTLRDSGVVFTPVKISLAF

SEQ ID NO: 5565 - protein, 409 aa, unidentified
MTLTERHIIRPTHPIFKRIKDFCHLSKNLYNYANFILREHYFAGFKLPTAYDLINRFVKESQRDYKALPAQSAQQVLMLLSQNWKSYLKALKAYKLKPSSFLARPKIPKFKPKDGVSIGVLTNQQTSFTKGRMTKIKFPKKANLKRLITKINPQTSRLKQVRLIPKTTCFIVEVVYEQTTHKLPQTHGIGIMGIDLGLNNFVTAIDNQSSPFIIKGGGVKSVNQWFNKLKAHYQAKAKTSNKRFWTKRLGKLALWRECKVNDFMHKASAYVVGHCLKKGISTIVIGKNDGWKQELKLGKRTNQNFTNIPYESFIEKLAYKCALVGITLHTTEERFTSKCDHLANEPMQHHEQYLGKRVKRGLFKSSIVKSLNADINGAIGILRKVFPDAVKTLRDSGVVFTPVKISLAF

SEQ ID NO: 5566 - protein, 451 aa, unidentified
MARKKAVKVLRKQKKRETMQQFTQKQNIGRACLTAKEFRLLQRMSHSSKALRNVGLYTIKQSYLNHNRVATVKEVDNAMQADMNYSGVQSNSVQAIRRALFTEVKSFFKALEEWKKHPDKFTGRPKFPNYSRSTDKRIIEIYQVPKVDENGYWIIPMNVAFRKKFGSIRIRMPKNLRNKNISYIEIVPKQKGRFFEVHYTYEMHVSQMKKQPMTTSNALGCDLGVDRLVSCVTNTGDAFLIDGKKLKSINQYFNKTIRNLQQKNVENGLSKRIVTNKIAALWHKRERQIHGYIAQTVGLLFKKVKEFDIDTIVVGYNAGWKQKSHMGKKNNQTFVQIPFEKLIAAIENKCIKEGIRFFKQEESYTSKASFLDKDPVPVWSKDDRTQYRFSGKRITRGLYQSKAGTCIHADMNGALNTLKKSGVVELDDNLKVKTPILLEVQKRKAVASRIA

SEQ ID NO: 5567 - protein, 416 aa, unidentified
MYGCQQVLIHASPDIQAIIEYLCSESNKVYNCSLYYARQIYIKTSRLVGRAEICEEMAKTKNRHFKSMYVSSAQQSCNSVAEALRSFRELMKLWYRGELEEKPSLPKYRKQGLFTVSYPKKWLKLTDEGIRIPLGNQVKTWFGIAEIFLPMPSNLDWQKIKEVRILPRNGCLYTEFVYSVEEIKAQLSEGHVLGIDHGINNWLTCVSNVGTSFIVDGKHLKSLNQWYNKRTSILKENQPQGFCSKQLASITEKRNRQVRDAINKAARLVINHCLDNQIGTIVFGWNKHQKDSANMGSKTNQKFVQIPTSRLKDRIVQLCEQYGIKFIETEESYTSKASFVDSDPLPPYGEKPEGWKESGRRVKRGLYRTANNWYINADCNGAANIIRKVAVTLGLDLNGASRGVLTSPLRVRLWTT

SEQ ID NO: 5568 - protein, 449 aa, unidentified
MARKKAVKVLRKQKKRETMQRFTQKQNIGRACLTAKEFRLLQRMSHSSKALRNVGLYTIKQSYLTHNKMATVKEVDTAMQADMNYWGIQSNSVQAIRRTLFTEVKSFFKALEQWKKKPETFTGRPKFPNYSRSTDKRIIEIYQVPKVDDNGYWMIPMNVAFRKKFGSIKIRMPKNLRHKKISYIEIVPKQKGRFFEVHYTYEMHVSQMKKQSTTTSNALSCDLGVDRLLSCVTNTGDAFLIDGKKLKSINQYFNKMIRNLQLKNVENGLSKRVVTNKMAALWHKRERQINGYISQTVGLLFKKVKACNIDTVVVGYNTGWKQKSDMGKKNNQKFVQIPFHKLIAAIENKCVKEGIRFLKQEESYTSKASFLDKDRVPVWSKDDRTHYRFSGKRITRGLYQSKAGTCIHADINGALNTLEKSRVVELDENLKVKTPILLEVQTRKAVASA

SEQ ID NO: 5569 - protein, 451 aa, unidentified
MARKKAVKVLRKQKKRENMQRFTQKQNIGRACLTAKEFRLLQRMSHSSKALRNVGLYTIKQSYLNHNKMATVKEVDTAMQANMNYSGIQSNSVQAIRRALFTEVKSFFKALEQWKKKPETFAGRPKFPNYSGPTDKRIIEIYQVPKVDDNGYWMIPMNVAFRKKFGSIKIRMPKNLRNRKISYIEIVPKQKGRFFEVHYTYEMHVSQMKKQSTTTSNALSCDLGVDRLLSCVTNTGDTFLIDGKKLKSINQYFNKMIRNLQQKNMDNGISKRIVTNKMAALWHKRERQINGYISQTVGLLFKKVKACNIDTVVVGYNAGWKQKSDMGKKNNQKFVQIPFHKLIATIENKCVKEGIRFLKQEESYTSKASFLDKDRVPVWSKDDRTHYRFSGKRITRGLYQSKAGTCIHADINGALNTLKKSRVVQLDENLKVKTPILLEVQKRKAVASCIA

SEQ ID NO: 5570 - protein, 509 aa, unidentified
MVRQRNWIIIIRSLEPKGITVEEWNYDEEHVHILFRFVPNIDLSKIILMNSLRKVVKTMVKKKAVKVLRKQKKRENMQRFTQKQNIGRACLTAKEFRLLQRMSHSSKALRNVGLYTIKQSYLNHNKMATVKEVDTAMQTDRNYWGIQSNSVQAIRRALFTEVKSFFKALEQWKKKPDTFTGRPKFPNYSRSTDKRIIEIYQVPKVDDNGYWIIPMNVAFRKKFGSIKIRMPKNLINKQISYIEIVPKQKGRFFEVHYTYEMHLSQMKKQSTTTSNALSCDLGVDRLLSCVTNTGDAFLIDGKKLKSINQYFNKMIGNLKQKNVENGLSKRVVTNKMAALWHKRERQINGYISQTVGLLFKKVKACNIDTVVVGYNAGWKQKSDMGKRNNQTFVQIPFHKLLAAIENKCVKEGIRFLKQEESYTSKASFLDKDRVPVWSKDDRTHYRFSGKRITRGLYRSKTGTCIHADINGALNTLQKSRVVELDDNLKVKTPILLEVQKRKAVASRIA

SEQ ID NO: 5571 - protein, 449 aa, unidentified
MARKKAVKVLRKQKKRETMQRFTQKQNIGRACLTAKEFRLLQRMSHSSKALRNVGLYTIKQSYLTHNKMATVKEVDTAMQADMNYWGIQSNSVQAIRRTLFTEVKSFFKALEQWKKKPETFTGRPKFPNYSGSTDKRIIEIYQVPKVDDNGYWMIPMNVAFRKKFGSIKIRMPKNLRHKKISYIEIVPKQKGRFFEVHYTYEMHVSQMKKQSTTTSNALSCDLGVDRLLSCVTNTGDAFLIDGKKLKSINQYFNKMIRNLQLKNVENGLSKHVVTNKMAALWHKRERQINGYISQTVGLLFKKVKACNIDTVVVGYNTGWKQKSDMGKKNNQKFVQIPFHKLIAAIENKCVKEGIRFLKQEESYTSKASFLDKDRVPVWSKDDRTHYRFSGKRITRGLYQSKAGTCIHADINGALNTLEKSRVVELDENLKVKTPILLEVQTRKAVASA

SEQ ID NO: 5572 - protein, 451 aa, unidentified
MVKKKAVKVLRKQKKRENIQRFTQKQNIGRACLTAKEFRLLQRMSHSSKALRNVGLYTIKQSYLNHNKMATVKEVDNAMQADMNYWGIQSNSVQAIRRALFTEVKSFFKAWEQWKKNPETFTGRPKFPNYSRSTDKRIIEIYQVPKVDDNGYWMIPMNVAFRKKFGSIKIRMPKNLRNKKISYIEIVPKQKGRFFEVHYTYEMHVSQMKQQSTTTSNALSCDLGVDRLLSCVTNTGDAFLIDGKKLKSINQYFNKMIGNLKQKNVENGLSKRVVTNKMAALWHKRERQVNGYISQTVGLLFKKVKAFDIDTIVVGYNTGWKQKSDMGKKNNQKFVQIPFHKLIAAIENKCIKEGIRFLKQEESYTSKASFLDKDPIPVWSKDDRAHYRFSGRRITRGLYQSKAGTCIHADINGALNTLEKSRVVELDDNLKVKTPILLEVQKRKAVASRIA

SEQ ID NO: 5573 - protein, 451 aa, unidentified
MARKKAVKVLRKQKKRENIQRFTQKQNIGRACLTAKEFRLLQCMSHSSKALRNVGLYTIKQSYLNNNKMATVKEVDTAMQADMNYWGIQSNSVQAIRRSLFTEVKSFFKGLEQWKKKPETFAGRPKFPNYSGSTDKRIIEIYQVPKVDDNGYWMIPMNVAFRKKFGSIKIRMPKNVRNKKISYIEIVPKQKGRFFEVHYTYEMHVSQMKKPSTTTSNALSCDLGVDRLLSCVTNTGDAFLIDGKKLKSINQYFNKMIRNLQLENVGNGLSKRVVTNKMAALWHKRERQINGYISQTVGLLFKKVKACNIDMVVVGYNTGWKQKSDMGKKNNQKFVQIPFHKLIAAIENKCIKEGIRFLKQEESYTSKASFLDKDKIPVWSKEDRTHYRFSGKRITRGLYQSKSGTCIHADINGALNTLQKSRVVELDDNLKVKTPILLEVQTRKAVASRIA

SEQ ID NO: 5574 - protein, 410 aa, unidentified
MKYETRVEQHQITTQDNRYKEADNLCFLSKNLYNATLYAVRQYYFKNKKYLRYYDVNKQFTHSNNTDYRALPAKVSKCTQRLVDKNFKSFFNLRRKGYFARIPKYLDTENGKQIVHYEKKAISFVKRKGYIHLSKTNIFIKTNLTKEEVQFVRIIPKGNHIVFEIGYNKLIEEKKKDNGRYASIDLGINNLMTVSSNVFTPFIINGKPIKSMNVYYNKLLARNKKLLWKLNRQKSSHRLCSIHRKRMNKVKDYFHKSTHYVVNQLVSNQVNTLVIGYNKGWKQDTTMRKSSKQTFIQIPFYTLIQILTYKCKEKGINVILQEESYTSKSSFLDLDEIPIWDSKKNIVTFSGKRVKRGLYMSKEGKLINADLNGSLNILRKYLEKQEAWNEKLFSNLVEVCSKPLLIRVSL

SEQ ID NO: 5575 - protein, 411 aa, unidentified
MKLVERHIISQNHPFWSEIDHYAFLSKNLFNLANYHYRQYFFENSQKLSFNQLYHLVSKTSDYLALPTKVSKQIIRRLEQAWVSYFAAFRAWKKHPEKFLGKPKIIKYKDKTKGRNLLIYSQESIYKKPLKEGICHLSMSDLKITTSRREIIEVRIVPKSSCYVIEIVYERRSETTDKQEIAGIDLGVNNLMAVTTNQTGVAPLLVNGRPLKAINTFYNKQRSRLQSQLKTQNNQHSSKRLILLTHKRNCRVENYLHTASKKVIDWCTIHQIGTLIIGHNERMKQSLNLGKRNNQQFVNIPHNRLIEMLTYKAQLKGIKVIITEESYTSQSSALDRDELPKYGEEKPLFKGKRLARGLYKMETNQLLNADVNGAFNIIRKVIPDVIDQGIKGLPFNPVVLDPLRMTKLSSF

SEQ ID NO: 5576 - protein, 411 aa, unidentified
MKLVERHIISQNHPLWSEIDHYAFLSKNLFNLANYHYRQYFFENSQKLSFNQLYHLVSKTSDYLALPTKVSKQIIRRLDQAWISYFAAFRAWKKHPEKFLGKPKIIKYKDKTKGRNLLIYSQEAIYKKPLKEGICHLSMSDVKLTTSRREIIEVRIVPKSSCYVIEIVYERRSETTDKQEIAGIDLGVNNLMAVTTNQTGVAPLLVNGRPLKAINTFYNKQRSRLQSQLKTRNNQPSSKRLIFLTHKRNCRVENYLHTASKRVIDWCILHEIGTLIIGHNERMKQSLNLGKRNNQQFVNIPHYRLIEMLTYKAQLKGIKVIITEESYTSQSSALDRDELPKYGEEKPLFKGKRLARGLYKMGTNQLLNADVNGSFNIIRKVIPDVIDQGIKGLPFNPVVLDPLRMTKLSGF

SEQ ID NO: 5577 - protein, 418 aa, unidentified
MKLVERHIISQNHPLWSEIDHYAFLSKNLFNLANYHYRQYFFENSQKLSFNQLYHLVSKTSDYLALPTKVSKQIIRRLEQAWVSYFAAFKAWKKHPEKFLGKPKIIKYKDKTKGRNLLIYSQESIYKKPLKEGICHLSMSDLKMTTSRREIIEVRIVPKSSCYVIEIVYERRSETTDKQEIAGVDLGVNNLMAVTTNQTGVAPLLVNGRPLKAINTFYNKQRSRLQSQLKTRNNQPSSKRLLFLTHKRNCRVENYLHTASKRVIDWCTIHQIGTLIIGHNERMKQSLNLGKRNNQQFVNIPHYRLIEMLTYKAQLKGIKVIITEESYTSQSSALDRDELPKYGEEKPLFKGKRLARGLYKMGTNQLLNADVNGAFNIIRKVIPDVIDQGIKGLPFNPVVLDPLVSEPVELRMTKLSGF

SEQ ID NO: 5578 - protein, 451 aa, unidentified
MAKKKAVKVLRKQKKRETLRRFTQKQNIGRACLTAQEFRLLQRMSHSSKALRNVGLYTMKQSYLNHNKMATVKEVDTAMQADMNYWGIQSNSVQAIRRALFTEVKSFFKALEQWKKNPEKFTGRPKFPNYSHSTDKRIIEIYQVPKVDENGFWMIPMSVAFRKKFGSIQIRMPKNLRNKNISYIEIVPKQKGRFFEVHYTYEMHVSQMKKQPMTTSNALGCDLGVDRLVSCVTNTGDAFLIDGKKLKSINQYFNKTIRNLQQKNVENGLSKRIVTNKIAALWHKRERQIHGYIAQTVGLLFKKVKEFDIDTIVVGYNAGWKQNSHMGKKNNQKFVQIPFHKLIAAIENKCIKEGIRFFKQEESYTSKASFLDKDPVPVWSKDDRTQYRFSGKRITRGLYQSKAGTCIHADINGALNTLQKSQVVELDGNLKVKTPILLEVQKRKAVASRIA

SEQ ID NO: 5579 - protein, 451 aa, unidentified
MARKKAVKVLRKQKKRETVQRFTQKQNIGRACLTAKEFRLLQRMSHSSKALRNVGLYTIKQSYLIHNKMATVKEVDNAMQADMNYWGVQSNSVQAIRRALFTEVKSFFKALEQWKKNPEKFTGRPKFPNYSRSTDKRIIEIYQVPKVDENGYWIIPMNVAFRKKFGSIKIRMPKNLRNKKISYIEIVPKQKGRFFEVHYTYEMHVSQMKKPSTTTSNALSCDLGVDRLVSCVTNTGDAFLIDGKKLKSINQYFNKMIRNLQLKNVENGLSKRIVTNKMAALWHRREQQINGYISQTVGLLFKKAQEFDIDTIIVGYNAGWKQKLDMGKKNNQKFVQIPFHKLMAAIENKCIKEGIRFVKQEESYTSKASFLDKDPVPVWAKDDRTHYRFSGKRITRGLYQSKAGICIHADINGALNTLQKSRVVELDENLKVKTPILLEVQKRKAIASRIA

SEQ ID NO: 5580 - protein, 451 aa, unidentified
MARKKAVKVLRKQKKRETMQRFTQKQSIGRACLTAKEFRLLQRMSHSSKALRNVGLYTMKQSYLNNNRMATVKEVDNAMQADINYPGVQSNSVQAIRRALFTEVKSFFKALEQWKKHPEKFTGRPKFPNYSRSTDKRIIEIYQVPKVDENGYWMIPMNVACRKKFGSIKIRMPKNVRNKKISYIEIVPKQKGRFFEVHYTYEMHVSQMKKPSTTTSNALSCDLGVDRLVSCATNTGDAFLIDGKKLKSINQYFNKMIRNLQQKNIENGLSKRVVTNQMATLWHKRERQINGYISQAVGLLFKKVKECNVDTIVVGYNTGWKQKSDMGKRNNQTFVQIPFHKLMAAIENKCVKEGIRFLKQEESYTSKASFLDKDKVPVWSKDDRTQYRFSGKRITRGLYQSKAGTCIHADINGALNTLQKSRVVELDENLKVKTPILLEVQKRKAVASRIA

SEQ ID NO: 5581 - protein, 451 aa, unidentified
MARKKTVKVLRKQKKRETMQRFTQKQHIGRACLTAKEFRLLQRMSHSSKALRNVGLYTIKQSYLNDNRVATVKEVDNAMQADMNYSGVQSNSVQAIRRALFTEVKSFFKALEQWKKHPDKFTGRPKFPNYSRPTDKRIIEIYQVPKVDDNGYWIIPMNIAFRKKFGSIRIRMPKNVRNKKISYIEIVPKQTGRFFEVHYTYEMHVSQMKKQPTTTSNALGCDLGVDRLVSCVTNTGDTFLIDGKKLKSINQYFNKTIRNLGLKNMENGLSKRVVTNKMAALWHKRERQIHGYIAQTVGLLFKKVKEFDIDTIVVGYNAGWKQKSHMGKKNNQTFVQIPFHKLMAAIENKCVKEGIRFLKQEESYTSKASFLDKDPVPVWAKNDRTQYRFSGKRITRGLYQSKAGTCIHADMNGALNTLRKSRVVELNDNLKVKTPILLEVQKRKAVASRIA

SEQ ID NO: 5582 - protein, 409 aa, unidentified
MTLTERHIIRPTHPIFKRIKDFCHLSKNLYNYANFILREHYFAGFKLPTAYDLINRFVKESQRDYKALPAQSAQQVLMLLSQNWKSYLKALKAYKLKPSSFLARPKIPKFKPKDGVSIGVLTNQQTSFTKGRMTKIKFPKKANLKRLITKINPQTSRLKQVRLIPKTTCFIVEVVYEQTTHKLPQTHGIGIMGIDLGLNNFVTAIDNQSSPFIIKGGGVKSVNQWFNKLKAHYQAKAKTSNKRFWTKRLGKLALWRECKVNDFMHKASAYVVGHCLKKGISTIVIGKNDGWKQELKLGKRTNQNFTNIPYESFIEKLAYKCALVGITLRTTEESFTSKCDHLANEPMQHHEQYLGKRVKRGLFKSSIGKSLNADINGAIGILRKVFPDAVKTLRDSGVVFTPVKISLAF

SEQ ID NO: 5583 - protein, 409 aa, unidentified
MTLTERHIIRPTHPIFKRIKDFCHLSKNLYNYANFILREHYFAGFKLPTAYDLINRFVKESQRDYKALPAQSAQQVLMLLSQNWKSYLKALKAYKLKPSSFLARPKIPKFKPKDGVSIGVLTNQQTSFTKGRMTKIKFPKKANLKRLITKINPQTSRLKQVRLIPKTTCFIVEVVYEQTTHKLPQTHGIGIMGIDLGLNNFVTAIDNQSSPFIIKGGGVKSVNQWFNKLKAHYQAKAKTSNKRFWTKRLGKLALWRECKVNDFMHKASAYVVGHCLKKGISTIVIGENDGWKQELKLGKRTNQNFTNIPYESFIEKLAYKCALVGITLHTTEERFTSKCDHLANEPMQHHEQYLGKRVKRGLSKSSIGKSLNADINGAIGILRKVFPDAVKTLRDSGVVFTPVKISLAF

SEQ ID NO: 5584 - protein, 409 aa, unidentified
MTLTERHIIRPTHPIFKRIKDFCHLSKNLYNYANFILREHYFAGFKLPTAYDLINRFVKESQRDYKALPAQSAQQVLMLLSQNWKSYLKALKAYKLKPSSFLARPKIPKFKPKDGVSIGVLTNQQTSFTKGRMTKIKFPKKANLKRLITKINPQTSRLKQVRLIPKTTCFIVEVVYEQTTHKLPQTHGIGIMGIDLGLNNFVTAIDNQSSPFIIKGGGVKSVNQWFNKLKAHYQAKAKTSNKRFWTKRLGKLALWRECKVNDFMHKASAYVVGHCLKKGISTIVIGKNDGWKQELKLGKRTNQNFTNIPYESFIEKLAYKSALVGITLHTTEERFTSKCDHLANEPMQHHEQYLGKRVKRGLFKSSIGKSLNADINGAIGILRKIFPDAVKILRDSGVVFTPVKISLAF

SEQ ID NO: 5585 - protein, 420 aa, unidentified
MSKKTKNMGCQQVLLHPDQNLSAILEYLSGEANKVFNCSVYYARQVFFKENRFVTQGELCGQMKWNRHFNAMYASSAQQICNGIVESFKSFKQLSKLFGSGELVNKPKPPNYRKPGLFTVSYPKRWLKLTEKGIRVPLGRKVKAWFGLENFYLPMASNLDWNSIKEIRILPHHGCFYVEFVYEIKIQLVKLDKTHALSIDHGLDNWLTCVDTLGHSFIVDGKHLKSKNQWYNKQIAALKENQPQGFWSKRLARITEKRNRQMRDAVNKTARLIINHGLKHGIGTIVFGWNKGQKQSIELGTQTNQKLVQIPTARLKERIKELCSLYGLKFVETEESYTSKASFLDHDVLPTYGEKPDNWEPSGKRVKRGLYHSAAGYLINADCNGAANILRKVAGRFNLNLDQLGRGALTTPLRVRFWIA

SEQ ID NO: 5586 - protein, 435 aa, unidentified
MYGCQQHLVKNTSEVMAVLEYLCTEANKLTNCGIYYCRQMLFKAGRFVSKAELDFELKSNLHFKAMRSACAQQTLHSVIESFNSYARLAKMFTSGELAQKPKPPKYRKKNGLAVVSYPARWVKLVNGMLKFPLGKQVKAWFGIDHFLLPMPSNLDFNQIKELRFVPRNNCFYLEFVYEQPTREKGQPIAENVLGIDPGLNNWLTCVSNVGKAFIVDGKKVKSQNQWYNKQVAKIKSGKSADYWDDNLAAITEKRNRQMRDNVNKAARFVINWCIEHQVGTIVFGWNQRQKDSINIGKKNNQQFVQIPTAKLKARIAELSEQYGIKFVETEESYTSKASFLDEDFLPTFGEKPVCVAFRRKRWEPSGKRVNRGLYRSATGKLINADANGAGNIIKKVATQLSLDLAKVGREVLMLPQRYKLDDLTRKYRKQCLAWQ

SEQ ID NO: 5587 - protein, 441 aa, unidentified
MFGCQQVLIKTDKDTKAIIEYLCRESNSLYNCSVYYARQIWFKTGKIVTGFDLTKEMKSNPHFRAGYASSMQQTCLNVGESFKSFKQLLKKSLKGELNQKPNAPKYRKSGGLFTVTYPKKWLKLIDGNVRFPLGNQVKVWFKLTEFLLPFPINLKWESIKEVRIVPRNGCLYAEFVYKQILEYRQIQPVDATKVSQSGLGGFPQEELAVLGIDHGLNNWLTCVSNVETSFIIDGKHLKSINQWYNKQVATLKQGKPKGFWSRTLAHVTEKRNRQMRDAVNKAARIVINHCLINGIGTIVFGWNQGQKNESNMGTKNNQKFVQIPTAKLKERIAQLCEQYGIKFVETEESYTSKASFLDNDELPKYGEKPDGWQSSGKRIKRGLYRSADNWLVNADCNGSANILRKVKAMLKLDLSRVIRGILTMPIRIRFWSKAVPESASL

SEQ ID NO: 5588 - protein, 411 aa, unidentified
MKLVERHIISQNHPFWSEIDHYAFLSKNLFNLANYHYRQYFFENSQKLSFNQLYHLVSKTSDYLALPTKVSKQIIRRLEQAWVSYFAAFRAWKKHPEKFLGKPKIIKYKDKTKGRNLLIYSQESIYKKPLKEGICHLSMSDLKITTSRREIIEVRIVPKSSCYVIEIVYERRSETTDKQEIAGIDLGVNNLMAVTTNQTGVAPLLVNGRPLKAINTFYNKQRSRLQSQLKTQNNQHSSKRLILLTHKRNCRVENYLHTASKRVIDWCTIHQIGTLIIGHNERMKQSLNLGKRNNQQFVNIPHNRLIEMLTYKAQLKGIKVIITEESYTSQSSALDRDELPKYGEEKPLFKGKRLARGLYKMETNQLLNADVNGAFNIIRKVIPDVIDQGIKGLPFNPVVLDPLRMTKLSSF

SEQ ID NO: 5589 - protein, 451 aa, unidentified
MAKKKAVKVLRKQKKRETLRRFTQKQNIGRVCLTAQEFRLLQRMSHSSKALRNVGLYTMKQSYLNHNKMATVKEVDTAMQADTNYWGVQSNSVQAIRRALFTEVKSFFKALEQWKKNPEKFTGRPKFPNYSHSTDKRIIEIYQVPKVDENGFWIIPMSVAFRKKFGSIKIRMPKNLRNKKISYIESVPKQKGRFFEVHYTYEMHVSQMKQQSTTTSNALSCDLGVDRLVSCVTNTGDAFLIDGKKLKSINQYFNKMICNLGQKNMDNGISKRIVTNKMAALWHKRERQINGYIAQTVGLLFKKVKEFDIDTIVVGYNAGWKQNSHMGKKNNQKFVQIPFHKLIAAIENKCIKEGIRFFKQEESYTSKASFLDKDPVPVWSKDDKTQYRFSGKRMTRGLYQSKAGTCIHADINGALNTLQKPQVVELDGNLKVKTLILLEVQKRKAVASRIA

SEQ ID NO: 5590 - protein, 451 aa, unidentified
MVKKKAVKVLRKQKKRETLRRFTQKQNIGRACLTAKEFRLLQCMSHSSKALRNVGLYTIKQSYLNHNRMATVKEVDTAMQADMNYWGMQSNSVQAIRRALYAEVKSFFKALKKWKENPETFTGRPKFPNYSRSTDKRIIEIYQVPKVDENGYWMIPMSVAFRKKFGSIKIRMPKNIRNKKISYIEIVPKQKGRFFEVHYTYEMHVSQMKKQSTTISNALSCDLGVDRLVSCVTNTGDTFLIDGKKLKSINQYFNKKIRNLQQKNIENGISKRVVTNKIAALWHKREKQINGYISQTVGLLFKKVKAFGIDTIVVGYNAGWKQKSDMGKKNNQKFVQIPFHKLIAAIENKCIKEGIRFFKQEESYTSKASFLDKDPVPVWSKDDRTQYRFSGKRMTRGLYQSKAGTCIHADINGALNTLEKSRVVEWDDNLKVKTPILLEVQKRKAVASRIA

SEQ ID NO: 5591 - protein, 409 aa, unidentified
MTLTERHIIRPTHPIFKRIKDFCHLSKNLYNYANFILREHYFAGFKLPTAYDLINRFVKESQRDYKALPAQSAQQVLMLLSQNWKSYLKALKAYKLKPSSFLERPKIPKFKPKDGVSIGVLTNQQTSFTKGRMTKIKFPKKANLKRLITKINPQTSRLKQVRLIPKTTCFILEVVYEQTTHKLPQTHGIGIMGIDLGLNNFVTAIDNQSSPFIIKGGGVKSVNQWFNKLKAHYQAKAKTSNKHFWTKRLGKLALWRECKVNDFMHKASAYVVGHCLKKGISTIVIGKNDGWKQELKLGKRTNQNFTNIPYESFIEKLAYKSALVGITLHTTEERFTSKCDHLANEPMQHHEQYLGKRVKRGLFKSSIGKSLNADINGAIGILRKVFPDAVKTLRDSGVVFAPVKISLAF

SEQ ID NO: 5592 - protein, 409 aa, unidentified
MTLTERHIIRPTHPIFKRIKDFCHLSKNLYNYANFILREHYFAGFKLPTAYDLINRFVKESQRDYKALPAQSAQQVLMLLSQNWKSYLKALKAYKLKPSSFLARPKIPKFKPKDGVSIGVLTNQQTSFTKGRMTKIKFPKKANLKRLITKINPQTSRLKQVRLIPKTTCFIVEVVYEQTTHKLPQTHGVGIMGIDLGLNNFVTAIDNQSSPFIIKGGGVKSVNQWFNKLKAHYQAKAKTSNKRFWTKRLGKLALWRECKVNDFMHKASAYVVGHCLKKGISTIVIGKNDGWKQELKLGKRTNQNFTNIPYESFIEKLAYKSALVGITLHSTEERFTSKCDHLANEPMQHHEQYLGKRVKRGLFKSSIGKSLNADINGAIGILRKVFPDAVKTLRDSGVVFTPVKISLAF

SEQ ID NO: 5593 - protein, 451 aa, unidentified
MARKKAVKVLRKQKKRETIQRFTQKQNIGRSCLTAKEFRLLQRMSHSSKVLRNVGLYTIKQSYLNHNKMATVKEVDTAMQADMNYSGIQSNSVQAIRRALFIEVKSFFKAMEQWKKNPEKFTGRPKFPNYSRSTDKRIIEIYQVPKVDDNGYWMIPMNVAFRKKFGSIKIRMPKNLRHKKISYIEIVPKQKGRFFEVHYTYEMHVSQMKKLSTTTSSALSCDLGVDRLVSCVTNTGDTFLIDGKKLKSINQYFNKMICNLQQKNIENGLSKRIVTNRMAALWHKRERQINGYISQTVGLLFKKVKTFGIDTVVVGYNAGWKQKSDMGKKNNQQFVQIPFHKLIAAIENKCVKEGIRFLKQEESYTSKASFLDKDPVPVWTKDDKTHYHFSGKRISRGLYQSKAGTCIHADINGALNTLQKSKVVELDGNLKVKMPILLEVQKRKAVASRIA

SEQ ID NO: 5594 - protein, 407 aa, unidentified
MRLVERHIITKNHRLFAECDRVCFAAKNLYNLANYTIRQHFFATSTVLGYNALDKLMQPNDAYRALPSKVSQQVLMQLCRNWKAHFAAMREYGKHPERFQGKPKLPRYKDKEQGRFLALYTVQAVSKPHLRNGIVRLSMTTIDVPTKQRDIQQVRISPQLDHYVIEIVYEQAPKPYDLEKTADKSKIASVDIGIGTLAAVTSNQAGFPPLLINGRPLKSMNAYYNKQKAVLQSRMGGEKQTSRRIRKLTHKRNCKVDNYLHHASSVIIKELLKHRIGTLVIGKNPHWKQEVNLGKRTNQAFVNIPHARFIDQLRYKAALVGITVILTEESYTSKCSFLDNEACTKHETYMGKRKHRGLFVASDGRQINADINGAANILRKVFPNAFADGIQGVVVRPVRLTPYKVAA

SEQ ID NO: 5595 - protein, 412 aa, unidentified
MRLVQKHIIDKHHGFYAECARLCFLSKNLFNYANYLIRQSFIFEAKYLNYNAMVKLCQGTADYTALPAKVSQQTLMRLHESWISFFEASKKYANCPQKFLGRPKLPQYKHKTDGRFVVTYTSQAVSQQWLTKGVVHLSQTDIFLTTRVREIQQVRIVPLPFHYAIEVVYEAIAQTQQGNEENIAGIDIGLNNLAALSSNVLGLTPLIINGRPLKALNAYYNKKKAQLQSQLKREQQTSNRIKQLTHKRNCKVDNYLHNASRLIINHLAANHIGTLVIGKNDGWKQEINIGKRNNQNFVSIPHARFIEMLKYKACLAGIKVVITEESYTSKCSFLDFEPMSKQQRYKGRRIKRGLFRASDGQLINADMNGSLNIIRKAFGNEAFASDSIQDLVVSPVRVTPYNIDPGFRGRSP

SEQ ID NO: 5596 - protein, 410 aa, unidentified
MRLVERHIIDKSHSFSKECDDLAWRSKNLYNYCNYLVRQSFVLENTYLDNCQIYHEVKSHESYKALPAKVSNQVLISLHRNWKSFFEAMKEWKQNPGKFLGKPKLPKYKDNLKGRFCVVYEKGAISKPALVKGLVKLSKTSIEFPTKCQNVQQIRIIPQSGQYVIEVVYEIASKLNQLNFQHIAAIDIGVSNLAAVTSNQKGFNPLLINGKPLKALNQHYNKQKAKLQSLLKGKAQTSKRIQQLSAKRNNQVDGYLHKASRLIINYLLPNEIGTLVIGKNDLWKQESSLGRRNNQQFVSIPHAKFVEMLTYKAELVGIKVILTEESYTSKSSFLDNDPIPTYGKKDSALKFSGRRIKRGLYKSAGGTIINADVNGSYNILRKVFPTALVYRDSGRAVRPIRITPNEFKKA

SEQ ID NO: 5597 - protein, 402 aa, unidentified
KNLYNAANYLIRQSFVYGWGYINYNEMNRLMKSHQAYKELPAKVSQQTLMILDKNWKSFFEAVKAYKIEPARFTGRPKLPKYKDKVKGRNILVYTIQAISSKQLKKGIIQLSGTNISIKTLVKPEQICQVRLVPKCDSYVIEVIYNACTEPESTLDENQKESVASIDLGLNNLVALTSNQPGFVPLLINGRPLKSINQFYNKRKAQLQSQLKGNRQTSSRLGRLTRCRHQKVDNYLHHASRQIINLLGSQKIGMLVIGKNLQGQSEINLGNKTNQNFVSIPHARLIEMLKYKAELIGIKVIEQEESYTSKSNFLNLDPIPVYGNIDAHDVTFSGSRIKRGLYKTSCGRLINADVNGSYNILRKAIPNAFCNGIESCVVQPRRVNPLEVKAKGEGLNASHVMS

SEQ ID NO: 5598 - protein, 451 aa, unidentified
MARKKAVKVLRKQKKRETMQRFTQKQNIGRACLTAKEFRLLQRMSHSSKALRNVGLYTMKQSYLNHNRMATVKEVDTAMQNDMNYSGIQSNSVQAIRRALFTEGKSFFKALEQWKKNPEKFTGRPKFPNYSRSTDKRIIEIYQVPKVDENGYWMIPMNVAFRKKFGSIKIRMPKNLRNKNISYIEIVPKQKGRFFEVHYTYEMHVSQMNKQPTTTSNALSCDLGVDRLISCVTNTGDAFLIDGKKLKSINQYFNKMICNLQQKNMDNGIAKRIVTNKIAALWHKRERQINGYIAQTVGLLFKKVKEFDIDTIVIGYNAGWKQKSHMGKKNNQKFVQIPFQKLIAAIENKCVKEGIRFFKQEESYTSKASFLDKDPVPVWSKDDKTQYRFSGKRITRGLYQSKAGTCIHADINGALNILKKSGVVELDDNLKVKTPILLEVKKRKAVTSRIA

SEQ ID NO: 5599 - protein, 451 aa, unidentified
MARKKAVKVLRKQKKRENIQRFTQKQNIGRACLTAKEFRLLQRMSHSSKALRNVGLYTIKQSYLNNNKMATVKEVDTAMQADMNYWGIQSNSVQAIRRSLFTEVKSFFKGLEQWKKKPETFAGRPKFPNYSGSTDKRIIEIYQVPKVDDNGYWMIPMNVAFRKKFGSIKIRIPKNVRNKKISYIEIVPKQKGRFFEVHYTYEMHVSQMKKPSTTTSNALSCDLGVDRLLSCVTNTGDAFLIDGKKLKSINQYFNKMIRNLQLKNVENGLSKRVVTNKMAALWHKRERQINGYISQTVGLLFKKVKACNIDMVVVGYNTGWKQKSDIGKKNNQKFVQIPFHKLIAAIENKCIKAGIRFLKQEESYTSKASFLDKDKIPVWSKEDRTHYHFSGKRITRGLYQSKSGTCIHADINGALNTLQKSRVVELDDNLKVKTPILLEVQKRKAVASRIA

SEQ ID NO: 5600 - protein, 451 aa, unidentified
MARKKAVKVLRKQKKRETMQRFTQKQNIGRACLTAKEFRLLQRMSHSSKALRNVGLYTIKKSYLNHNKMATVKEVDTAMQADLNYSGIQSNSVQAIRRALFTEVKSFFKALEQWKKTPETFTGRPKFPNYSGSTDKRIIEIYQVPKVDDNGYWLIPMNVAFRKKFGSIKIRMPKNLRNKKISYIEIVPKQKGRFFEVHYTYEMHVSQMKKQSTTTSNALSCDLGVDRLLSCVTNTGDAFLIDGKKLKSINQYFNKMIRNLQLKNVENGLSKRVVTNKMAALWHKRERQINGYISQTVGLLFKKVKACNIDTVVVGYNTGWKQKSDMGKKNNQKFVQIPFHKLIAAIENKCVKEGIRFLKQEESYTSKASFLDKDRVPVWSKDDRTHYRFSGKRITRGLYQSKAGTCIHADINGALNTLEKSRVVELDENLKVKTPILLEVQKRKAVASCIA

SEQ ID NO: 5601 - protein, 451 aa, unidentified
MAKKKAVKVLRKQKKRENMQRFTQKQNIGRACLTAKEFRLLQRMSHSSKALRNVGLYTIKQSYLNDNKMATIKEVDTAMQADTNYWGMQSNSVQAIRRTLFTEVKSFFKALEQWKKNPEKFTGRPKFPNYSRSTDKRIVEIYQVPKVDDNGYWMIPMNVAFRKKFGSIKIRMPKNLKNKKISYIEIVPKQKGRFFEVHYTYEMHVSQLKKPSTTTSNALSCDLGVDRLVSCVTNTGDAFLIDGKKLKSINQYFNKMICNLGQKNMDNGISKRIVTNKMAALWHKRERQINGYIAQTVGLLFKKVKEFDIDTIVVGYNAGWKQNSHMGKKNNQKFVQIPFHKLIAAIENKCIKEGIRFFKQEESYTSKASFLDKDPVPVWSKDDRTQYRFSGKRITRGLYQSKAGTCIHADINGALNTLQKSQVVELDGNLKVKTPILLEVQKRKAVASRIA

SEQ ID NO: 5602 - protein, 401 aa, unidentified
MQLVEKHVIRKGDARYEAIDQAAFVSKNLYNAANYEIRQAFIFEGVYLNSNQMHHLMKTHPAYQALPRKVSQQVLRTLDKNWKSFFRAIAEWREHPEKFLGRPCLPKYKDKQQGRNLLIYTIQAISKPALRQGYIQPSGLPIRIKTNHQNVDQVRIIPRHGFYVVEVVYEQEPVQAAVDPQLFAGIDIGIDNLATLTSNKKGFVPRIVNGRPVKSINQFYNKRKAELDEKLMKMDARRRHSHRLERLTTKRTRRIHHSLHTASRRIVNLLVEEGIGTLVIGKNDGWKQEVEMGKRTNQQFVAIPHARFIEMLAYKAQLVGIRVIITEESYTSKCSFLDNEPIGKHETYAGKRVKRSLFRASDGRLLNADVNGSANIIRKVAPNAFADGVEAVVVRPVRFCA

SEQ ID NO: 5603 - protein, 451 aa, unidentified
MARKKAVKVLRKQKKRENMQRFTQKQNIGRACLTAKEFRLLQRMSHSSKALRNVGLYTIKQSYLNNNKMATVKEVDTAMQTDMNYWGIQSNSVQAIRRTLFTEVKSFFKAMEQWKKNPETFTGRPKFPNYSRSTDKRIIEIYQIPKVDDNGYWLIPMNVAFRKKFGSIKIRMPKNVRNKKISYIEIVPKQKGRFFEVHYTYEMHVSQMKKQPTTTSNALSCDLGVDRLLSCVTNTGDAFLIDGKKLKSINQYFNKMIRNRQQKNIENGLSKRVVTNQMAALWHKRERQINGYISQTVGLLFKKVKAFSIDTVVVGYNAGWKQKSDMGKKNNQKFVQIPLHKLIAAIENKCVKEGIRFLRQKESYTSKASFLDKDPIPVWSKDDRTYHRFNGKRITRGLYQSKSGKCIHADINGALNTLEKSRVVELDENLKVRTPILLEVQKRKAVASRIA

SEQ ID NO: 5604 - protein, 451 aa, unidentified
MARKKAVKVLGKQKKRENIQRFTQKQNIGRACLTAKEFRLLQRMSHSSKALRNVGLYTMKQSYLNDNKMATVKEVDTAMQADTNYWGIQSNSVQAIRRALYAEVKSFFKALEQWKKNPEKFTGRPKFPNYSRSTDKRIIEIYQVPKVDENGYWIIPMNVAFRKKFGSIQIRMPKNLRNKNISYIEIVPKQKGRFFEVHYTYEMHVSQMKQQSTTTSNALSCDLGVDRLLSCVTNTGDAFLIDGKKLKSINQYFNKMICNLQQKNMDNGISKRIVTNKMAALWHKRERQINGYIAQTVGLLFKKVKEFDIDTIVIGYNAGWKQKSHMGKKNNQKFVQIPFQKLIAAIENKCVKEGIRFFKQEESYTSKASFLDKDPVPVWSKDDRTQYRFSGKRITRGLYQSKAGTCIHADINGALNTLKKSGVVELDDNLKVKTPILLEVQKRKAIASCIA

SEQ ID NO: 5605 - protein, 451 aa, unidentified
MARKKAVKVLRKQKKRENMQRFTQKQNIGRASLTAKEFRLLQRMSHSSKALRNVGLYTMKQSYLNHNRMATVKEVDTAMQNDMNYPGVQSNSVQAIRRSLFTEVKSFFKAMEQWKKNPEKFTGRPKFPNYSRSTDKRIIEIYQVPKVDENGYWIIPMNVAFRKKFGSIQIRMPKNLRNKNISYIEIVPKQKGRFFEVHYTYEMHVSQMKKPSTTTSNALSCDLGVDRLVSCVTHTGDAFLIDGKKLKSINQYFNKMICNLGQKNMDNGISKRIVTNKMAALWHKRERQINGYIAQTVGLLFKKVKEFNLDTIVVGYNAGWKQKSHMGKKNNQKFVQIPFQKLIAAIENKCVKEGIRFFKQEESYTSKASFLDKDPVPVWSKDDKTQYRFSGKRITRGLYQSKAGTCIHADMNGALNTLKKSGVVQLDDNLKMKTPILLEVQKRKAVASRIA

SEQ ID NO: 5606 - protein, 451 aa, unidentified
MARKKAVKVLRKQKKRETIQRFTQKQNIGRACLTAKEFRLLQRMSHSSKALRNVGLYTIKQSYLNDNKMATVKEVDTAMQADMNYWGIQSNSVQAIRRALFTEVKSFFKALEQWKKNPEKFTGRPKFPHYSRSTDKRIIEIYQVPKVDENGYWIIPMNVAFRKKFGSIQIRMPKNLRNKKISYIEIVPKQKGRFFEVHYTYEVHVSQMKKPSTTTSNALSCDLGVDRLVSCATNTGDTFLIDGKKLKSINQYFNKMIRNLQLKNMENGLSKRVVTNQMAALWHKRERQINGYISQTVGLLFKKVKAYNIDTIVIGYNVGWKQKSDMGKKNNQQFVQIPFHKLIAAIENKCVKEGIRFFKQEESYTSKASFLDKDPVPVWTKDDKTYYHFSGKRMTRGLYQSKAGTCIHADINGALNTLEKSRVVEWDDNLKVKTPILLEVQKRKAVASRIA

SEQ ID NO: 5607 - protein, 283 aa, unidentified
MARKKAVKVLRKQKKRENMQRFTQKQNIGRACLTAKEFRLLQRMSHSSKALRNVGLYTMKQSYLNNNRMATVKEVDTAMQNDMNYSGIQSNSVQAIRRSLFTEVKSFFKALEQWKKNPEKFTGRPKFPNYSRSTDKRIIEIYQVPKVDEKGYWMIPMNVAFRKKFGSIKIRMPKNLRNKNISYIEIVPKQKGRFFEVHYTYEMHVSQMKKQPTTTSNALSCDLGVDRLVSCVTNTGDTFLIDGKKLKSINQYFNKMICNLQQKNMDNGISKRIVTNTMAALWH

SEQ ID NO: 5608 - protein, 451 aa, unidentified
MARKKAVKVLRKQKKRETIQQFTQKQNIGRSCLTAKEFRLLKCMSHSSKALRNVGLYTIKQSYLNDNKMATVKEVDTAMQADMNYWGIQSNSVQAIRRALFTEVKSFFKALDQWKKKPETFTGRPKFPNYSRSTDKRIIEIYQVPKVDENGYWIIPMNVAFRKKFGSIRIRMPKNLRNKKISYIEIVPKQKGRFFEVHYTYEMHVSQMKKQPTTTSNALGCDLGVDRLVSCVTNTGDAFLIDGKKSKSINRYFNKMICNLQQKNVGNGLSKRIVTNKIAALWHKRERQINGYIAQTVGLLFKKVKEFDIGTIVVGYNAGWKQKSHMGKKNNQTFVQIPFHKLIAAIENKCIKEGIRFLKQEESYTSKASFLDKDPVPVWSKDDRTQYRFSGKRITRGLYQSKSGKCIHADINGALNTLQKSRVVQLDDNLKVKTPILLEVQKRKAVASRIA

SEQ ID NO: 5609 - protein, 445 aa, unidentified
MKVLRKQKKREIIQRFTQKQNIGRACLTAKEFRLLQRMSHSSKALRNVGLYTIKQSYLNHNKMATIREVDTAMQADMNYWGIQSNSVQAIRRALFTEVKSFFKALEQWKKKTEQFTGRPKFPNYSRSTDKRIIEIYQVPKVDENGYWMIPMNVAFRKKFGSIKIRMPKNLRNKNISYIEIVPKQKGRFFEVHYTYEMHVSQMKKPPTTTSNALSCDLGVDRLLSCVTNTGDAFLMDGKKLKSINQYFNKMICNLGQKNMDNGISKRIVTNKMAALWHKRERQINGYIAQTVGLLFKKVKEFDIDTIVVGYNAGWKQNSHMGKKNNQKFVQIPFQKLIAAIENKCVKEGIRFFKQEESYTSKASFLDKDPVPVWSKDDKTQYRFSGKRITRGLYQSKAGTCIHADINGALNTLKKSGVVELDGNLKVKTPILLEVQKRKAIALCIA

SEQ ID NO: 5610 - protein, 431 aa, unidentified
MFGCQQGLIKADKETRAIIEYLCRESNSLYNCSVYYARQIWFKTGKIVTGFDLTKEMKFNPHFKAGYASSMQQTCLNVGESFKSFKKLLKKSIKGELNQKPNVPKYRKSGGLFTVTYPKKWLKLIEGKIRFPLGEQVRAWFGLTEFFLPFPVNLKWELIKEVRIVPRNTCLYAEFVYQQIHCELKEGRSLPTHLDSTKVLGIDHGLNNWLTCVSNIETSFIIDGKHLKSVNQWYNKQIATLKEGKPQGFWSRTLAHVTEKRNQQMRDAVNKAARIVINHCLIHGIGTIVFGWNQGQKSESNMGAKNNQKFVQIPTAKLKERIVQLCEQYDIKFVETEESYTSKASFLDNDELPKYGEKPDGWQSSGKRIKRGLYRTADNWLVNADCNGGANILRKVKTMLKLDLSRVTRGILTMPIRIRFWSNSVLESASL

SEQ ID NO: 5611 - protein, 431 aa, unidentified
MFGCQQVLIKADKETRAIIEYLCRESNSLYNCSVYYARQIWLKTGKIVTGFALTKEMKFNPHFKAGYASSMQQTCLNVGESFKSFKKLLKKSIKGELNQKPNVPKYRKSGGLFTVTYPKKWLKLIEGKIRFPLGEQVRAWFGLTEFFLPFPVNLKWELIKEVRIVPRNTCLYAEFVYQQIHCELKEGQSLPTHLDSTKVLGIDHGLNNWLTCVSNIETSFIIDGKHLKSVNQWYNKQIATLKEGKPKGFWSRTLAHVTEKRNQQMRDAVNKAARIVINHCLIHGIGTIVFGWNQGQKNESNMGAKNNQNFVQIPTAKLKDRIVQLCEQYGIKFVETEESYTSKASFLDNDELPKYGEKPDGWQSSGKRIKRGLYRTADNWLVNADCNGGANILRKVKTMLKLDLSRVTRGILTMPIRIRFWSNSVLESASL

SEQ ID NO: 5612 - protein, 426 aa, unidentified
MFGCQQELIHCDKETKAIIEYLCYESNSLYNCTVYYARQIWFKTSKIVSGFDLTAEMKTNKHFNAGYASAMQQTCLNVGESFKSFKKLLSKSRKGELDQKPKVPSYRKPGGLFTVTYPKRWLKLKDGFIRFPLGNQVKAWFGISEFFLPMPTNLDWSNIKEIRLLPRNRCFYAEFVYQQKIESIQLDKSKVLGIDHGIDNWLTCVSNVGTSFIVDGLHLKSINQWYNKSVAKIKENKPQGFWSNRLTAITEKRNRTMRDAVNKAARIVVNHCLENNLGSIVFGWNQRQKDGANMGKKNNQKFVQIPTAKLKTRIEQLCEQYEIDFVETEESYTSKSSFLDNDVLPTFGAKPEGWKSSGVRITRGQFQTSTGIKINADCHGAINIVKKVAAIFKFDLSGVGRGALSAPKKVLLWTLQKSPCLQTGEA

SEQ ID NO: 5613 - protein, 409 aa, unidentified
MTLTERHIIRPTHPIFKRIKDFCHLSKNLYNYANFILREHYFAGFKLPTAYDLINRFVKESQRDYKALPAQSVQQVLMLLSQNWKSYLKALKAYKLKPSSFLARPKIPKFKPKDGVSIGVLTNQQTSFTKGRMTKIKFPKKANLKRLITKINPQTSRLKQVRLIPKTTCFIVEVVYEQTTHKLPQTHGIGIMGIDLGLNNFVTAIDNQSSPFIIKGGGVKSVNQWFNKLKAHYQAKAKTSNKRFWTKRLGKLALWRECKVNDFMHKASAYVVGHCLKKGISTIVIGKNDGWKQELKLGKRTNQNFTNIPYESFIEKLAYKCALVGITLHTTEESFTSKCDHLANEPMQHHEQYLGKRVKRGLFKSSIGKSLNADINGAIGILRKVFPDAVKTLRDSGVVFTPVKISLAF

SEQ ID NO: 5614 - protein, 451 aa, unidentified
MARKKAVKVLRKQKKRENMQRFTQKQNIGRACLTAKEFHLLQRMSHSSKALRNVGLYTMKQSYLNDNKMATVKEVDTAMQADTNYWGIQSNSVQAIRRALYAEVKSFFKALEQWKKNPEKFTGRPKFPNYSRSTDKRIIEIYQVPKVDENGYWIIPMNVAFRKKFGSIQIRMPKNLRNKNISYIEIVPKQKGRFFEVHYTYEMHVSQMKKPPATTSNALSCDLGVDRLLSCVTNTGDAFLIDGKKLKSINQYFNKMICNLGQKNMDNGISKRIVTNKMAALWHKRERQINGYIAQTVGLLFKKVKKFDIDTIVIGYNAGWKQKSHMGKKNNQKFVQIPFQKLIAAIENKCVKEGIRFFKQEESYTSKASFLDKDPVPVWSKDDKTQYRFSGKRITRGLYQSKAGTCIHADINGALNTLKKSKIVELDKNLKVKTPILLEVQKRKAVTSRIA

SEQ ID NO: 5615 - protein, 451 aa, unidentified
MARKKAVKVLRKQKKRENMQRFTQKQNIGRACLTAREFRLLQRMSHSSKALRNAGLYTMKQSYLNDNKMATVKEVDTAMQTDMNYSGVQSNSVQAIRRALFTEVKSFFKALEQWKKNPEKFTGRPKFPNYSHSTDKRIIEIYQVPKVDESGFWMIPMSVAFRKKFGSIKIRMPKNLRNKKISYIEIVPKQKGRFFEVHYTYEMHVSQMKKQSATISNALSCDLGVDRLVSCVTNTGDAFLIDGKKLKSINQYFNKMIRNLQQKNIENGISKRVVTNKMAALWHKRERQINGYISETVGLLFKKVKAFGIDTIVIGYNTGWKQKSDMGKKNNQKFVQIPFHKLIAAIENKCIKEGIRFFKQEESYTSKASFLDKDPVPVWSKDNRAQYYFSGKRITRGLYQSKAGTCIHADINGALNTLQKSQVVELDGNLKVKTPILLEVQKRKAVASRIA

SEQ ID NO: 5616 - protein, 451 aa, unidentified
MARKKAVKVLRKQKKRENMQRFTQKQNIGRACLTAREFRLLQCMSHSSKALRNAGLYTMKQSYLNDNKMATVKEVDTAMQTDMNYSGVQSNSVQAIRRALFTEVKSFFKALEQWKKNPEKFTGRPKFPNYSHSTDKRIIEIYQVPKVDESGFWMIPMSVAFRKKFGSIKIRMPKNLRNKKISYIEIVPKQKGRFFEVHYTYEMHVSQMKKQSATISNALSCDLGVDRLVSCVTNTGDAFLIDGKKLKSINQYFNKMIRNLQQKNIENGISKRVVTNKMAALWHKRERQINGYISETVGLLFKKVKAFGIDTIVIGYNTGWKQKSDMGKKNNQKFVQIPFHKLIAAIENKCIKEGIRFFKQEESYTSKASFLDKDPVPVWSKDNRAQYYFSGKRITRGLYQSKAGTCIHADINGALNTLQKSQVVELDGNLKVKTPILLEVQKRKAVASRIA

SEQ ID NO: 5617 - protein, 451 aa, unidentified
MAKKKAVKVLQKQKKRETLRRFTQKQNIGRACLTAQEFRLLQRMSHSSKALRNVGLYTMKQSYLNHNKMATVKEVDTAMQADMNYWGIQSNSVQAIRRALFTEVKSFFKALEQWKKNPEKFTGRPKFPNYSHSTDKRIIEIYQVPKVDENGFWMIPMSVAFRKKFGSIQIRMPKNLRNKNISYIEIVPKQKGRFFEVHYTYEMHVSQMKQQSTTTSNALSCDLGVDRLVSCVTNTGDAFLIDGKKLKSINQYFNKMICNLQQKNMDNGISKRIVTNKMAALWHKRERQINGYIAQTVGLLFKKVKESDIDTIVVGYNAGWKQNSHMGKKNNQKFVQIPFHKLIAAIENKCIKEGIRFFKQEESYTSKASFLDKDPVPVWSKDNRAQYYFSGKRITRGLYQSKAGTCIHADINGALNTLQKSQVVELDGNLKVKTPILLEVQKRKAVASRIA

SEQ ID NO: 5618 - protein, 426 aa, unidentified
MFGCQQVLLHSDNETKAIIEYLCHESNSLYNCSVYYARQIWFKTGKIVSGFDLTAQMKNNKHFHAGYASAMQQTCLSVGEAFKSFKQLLAKSKKGELNQKPRVPNYRKPGGLFTVTYPKKWLKLVDNLIRFPLGNQVKAWFGITEFFLPMPSNLEWSDMKEIRILPRNRQFYAEFVYQTEKSIIEIDKSKVIGIDHGIDNWLTCVSNVGTSFIIDGLHLKSLNQWYNKTVANIKEGKPQGFWSNRLAAITEKRNRQMRNAVNKAARIVINHCIDNKIGTIVFGWNQRQKDSADLGKKNNQKFVQIPTAKLKGRIAQLCEQSGIVFVETEESYTSKTSFLDNDVLPTFGAKPEGWKSSGIRITRGQFRTSTGIKINADCNGAVNIIKKVAAIFKFDLSGVGRGALSAPKKVLLWTLQKSPRLQTGES

SEQ ID NO: 5619 - protein, 428 aa, unidentified
MQVFGCQQVLLHSDNETKAIIEYLCHESNSLYNCSVYYARQIWFKTGKIVSGFDLTAQMKNNKHFHAGYASAMQQTCLSVGEAFKSFKQLLAKSKKGELNQKPRVPNYRKPGGLFTVTYPKKWLKLVDNLIRFPLGNQVKAWFGITEFFLPMPSNLEWSDMKEIRILPRNRQFYAEFVYQTEKSIIEIDKSKVIGIDHGIDNWLTCVSNVGTSFIIDGLHLKSLNQWYNKTVANIKEGKPQGFWSNRLAAITEKRNRQMRNAVNKAARIVINHCIDNKIGTIVFGWNQRQKDSADLGKKNNQKFVQIPTAKLKGRIAQLCEQSGIVFVETEESYTSKTSFLDNDVLPTFGAKPEGWKSSGIRITRGQFRTSTGIKINADCNGAVNIIKKVAAIFKFDLSGVGRGALSAPKKVLLWTLQKSPRLQTGES

SEQ ID NO: 5620 - protein, 451 aa, unidentified
MVRKKAVKVLRKQKKRETMQRFTQKQNIGRACLTAKEFRLLQRMSHSSKALRNVGLYTIKQSYLNHNKMATVKEVDTAMQTDMNYWGIQSNSVQAIRRALFTEVKSFFKALEQWKKKPETFTGRPKFPNYSRSTDKRIIEIYQVPKVDDNGYWMIPMNVAFRKKFGSIKIRMPKNVRNKKISYIEIVPKQKGRFFEVHYTYEMHVSQMKKPSTTTSNALSCDLGVDRLVSCATNTGDTFLIDGKKLKSINQYFNKMIRNLQLKNMENGLSKRVVTNQMAALWHKRERQINGYISQTVGLLFKKVKACNIDTVVVGYNAGWKQKSDMGKKNNQKFVQIPFHKLIAAIENKCIKEGIRFLKQKESYTSKASFLDKDKVPVWSKEDRTHYHFSGKRITRGLYQSKAGTCIHADINGALNTLQKSKVVELDENLKVKTPILLEVQTRKAVASRIA

SEQ ID NO: 5621 - protein, 451 aa, unidentified
MARKKAVKVLRKQKKKETMQRFTQKQNIGRACLTAKEFRLLQRMSHSSKALRNVGLYTIKQSYLTHNKMATVKEVDNAMQADTNYWGVQSNSVQAIRRALFTEVKSFFKALEQWKKHPEKFTGRPKFPNYSRSTDKRIIEIYQVPKVDENGYWIIPMNVAFRKKFGSIQIRMPKNVRNKKISYIEIVPKQKGRFFEVHYTYEMHVSQMKKPSTTTSNALSCDLGVDRLVSCATNTGDAFLIDGKKLKSINQYFNKMIRNLGLKNMENGLSKRVVTNKMAALWHKRERKINGYISQTIGLLFKKVKEFDIDTIVVGYNTGWKQKSDMGKKSNQTFVQIPFHKLIAAIENKCIKEGIRFLKQEESYTSKASFLDKDPVPVWSKDDRTQYRFSGKRITRGLYQSKAGTCIHADMNGALNTLEKSKVVELDDNLKVKTPILLEVQKRKAVALRIA

SEQ ID NO: 5622 - protein, 451 aa, unidentified
MARKKAVKVLRKQKKRETMQRFTQKQNIGRACLTAKEFRLLKRMSHSSKALRNVGLYTMKQSYLNNNRIATVKEVDTAMQADMNYWGMQSNSVQAIRRALFTEVKSFFKALEQWKKNPEKFTGRPKFPNYSRSTDKRIIEIYQVPKVDENGYWIIPMNVAFRKKFGSIQIRMPKNLRNKKISYIEIVPKQKGRFFEVHYTYEMHVSQMKKPSTTTSNALSCDLGVDRLVSCVTNTGDAFLIDGKKLKSINQYFNKTIRNLQLKNMENGISKRIVTNKMAALWHKRERQINGYISQAVGLLFKKVKACNVDTIVVGYNAAWKQKSDMGKKNNQKFVQIPFHKLMAAIENKCVKEGIRFLKQEESYTSKASFLDKDPVPVWSKDDRTQYRFSGKRITRGLYQSKSGKCIHADMNGALNTLKKSKVVELDDNLKVKTPILLKVQKRKAVASRIA

SEQ ID NO: 5623 - protein, 451 aa, unidentified
MARKKAVKVLRKQKKRENIQRFTQKQNIGRACLTAKEFRLLQHMSHSSKALRNVGLYTIKQSYLNNNKIATVKEVDTAMQADMNYWGVQSNSVQAIRRALFTEVKSFFKALEQWKKNPEKFTGRPKFPNYSRSTDKRIIEIYQVPKVDENGYWIIPMNVAFRKKFGSIQIRMPKNLRNKKISYIEIVPKQKGRFFEVHYTYDMHVSQMKKQSTTTSNALSCDLGVDRLVSCATNTGDTFLIDGKKLKSINQYFNKTIRNLQQKNMENGISKRVVTNQMAALWHKREKQINGYISQTVGLLFKKVKEFDIDTIVVGYNTGWKQKSDMGKKSNQTFVQIPFHKLIAAIENKCVKEGIRFLKQEESYTSKASFLDKDPVPVWSKDDRTQYRFSGKRITRGLYQSKAGTCIHADINGALNTLQKSRVVEWDDNLRVKTPLLLEVQKRKAVASRIA

SEQ ID NO: 5624 - protein, 451 aa, unidentified
MARKKAVKVLRKQKKRETIQRFTQKQNIGRACLTAKEFRLLQRMSHSSKALRNVGLYTIKQSYLNDNKMATVKEVDTAMQADMNYWGIQSNSVQAIRRALFTEVKSFFKALERWKKKPETFTGRPKFPHYSRSTDKRIIEIYQVPKVDENGYWIIPMNVAFRKKFGSIQIRMPKNLRNKKISYIEIVPKQKGRFFEVHYTYEMHVSQMKKTSTTTSNALSCDLGVDRLVSCVTNTGDTFLIDGKKLKSINQYFNKMIRNLQQKNMENGISKRVVTNKIAALWHKRERQINGYISQTVGLLFKKVKAFDIDTIIVGYNAGWKQKSDMGKKNNQTFVQIPFHKLMEAIENKCVKEGIRFLKQEESYTSKASFLDKDPVPVWSKDNKMQYLFSGKRITRGLYQSKSGKCIHADINGALNTLQKSKVVEWDENLKVKTTILLEVQKRKAVASRIA

SEQ ID NO: 5625 - protein, 451 aa, unidentified
MARKKAVKVLRKQKKRETMQRFTQKQNIGRACLTAKEFRLLKRMSHSSKALRNVGLYTMKQSYLNNNRMATVKEVDTAMQADMNYWGIQSNSVQAILRTLFTEVKSFFKALEQWKKNPEKFTGRPKFPNYSRSTDKRIIEIYQVPKMDDNGYWMIPMSVAFRKKFGSIQIRMPKNLRNKKISYIEIVPKQKGRFFEVHYTYEMHVSQMKKQSTTTSNALSCDLGVDRLVSCATNTGDTFLIDGKKLKSINQYFNKTIRNLQQKNVENGLSKRIVTKKIAALWHKRERQINGYISQTVGLLFKKVKEFDIDTIVVGYNAGWKQKSHMGKKNNQTFVQIPFQKLMAAIENKCVKEGIRFLKQEESYTSKASFLDKDPVPVWSKDDRTQYRFSGKRITRGLYQSKAGTCIHADINGALNTLEKSKVVELDDNLKVKTPILLEVQKRKAVALRIA

SEQ ID NO: 5626 - protein, 451 aa, unidentified
MARKKAVKVLRKQKKRETMQRFTQKQNIGRACLTAKEFRLLQRMSHSSKALRNVGLYTIKQSYLNNNKIATVKEVDTAMQADLNYWGMQSNSVQAIRRALFTEVKSFFKALEQWKKKPEAFTGRPKFPNYSRSTDKRIIEIYQVPKVDENGYWIIPMSVAFRKKFGSIKIRMPKNLRNKKISYIEIVPKQKGRFFEVHYTYEMHVSQMKKQSTTTSNALSCDLGVDRLVSCATNTGDTFLIDGKKLKSINQYFNKMICNLQQKNIDNGISKRIVTNQMAALWHKRERQINGYISQTIGLLFKKVKALGIGTVVVGYNVGWKQKSDMGKKNNQKFVQIPFHKLIAAIENKCIKEGIRFFKQEESYTSKASFLDKDPVPVWSKDERTHYHFSGKRITRGLYQSKAGTCIHADINGALNTLEKSRVVELDDNLKVKTPILLEVQKRKAVASRIA

SEQ ID NO: 5627 - protein, 399 aa, unidentified
MQLVEQTVIGKNDPRYQTIDAAAFASKNLYNAALYEVRQSFIRTGIYFSYNEMDRRMKTHEAYKALPAKVAQQVLRGLDKNWKSFFAATKEWSLHPDKFQKRPGLPRYKDKANGRNVLVYTDQAISKKALRKRRMIVPSGLPIEVPTQQTTIDQVRIVPRIGYYVLETVYEQESIQADVHPDLIAGIDIGLNNLATLTANKDGFVPRIVNGRPIKSINQWYNKERARIQSQLAGNRYTTNRLERLTNKRTRKIDHYLHTSARRIIDLLVAEGIGTLIIGKNDQWKQQANMGRRTNQNFVSIPHARFIAMLTYKAQLVGITVQVTEESYTSKCSFLDNEPVKKHDIYLGKRVKRGLFRAADGRVINADVNGASNIIRKVAPAAFGQGSRGPVVGPVRLAV

SEQ ID NO: 5628 - protein, 451 aa, unidentified
MSRKKAVKVLRKQKKRETMRRFTQKQNIGRACLTVKEFRLLQRMSHSSKALRNVGLYTMKQSYLNNKKMATVKEVDTAMQTDMNYWGMQSNSVQAIRRALLTEVKSFFKALEQWKKKPETFTGRPKFPNYSRSTDKRIIEIYQVPKVDDNGYWMIPMNVAFRKKFGSIKIRMPKNLRNKKISYIEIVPKQKGRFFEVHYTYEMHVSQMKQQSTTTSNALSCDLGVDRLVSCVTNTGDAFLIDGKKLKSINQYFNKMIRNLQQKNMENGLSKRVVTNKMAALWHKRERQINGYISQTVGLLFKKVKACNIDTVVVGYNAGWKQKSDMGKKNNQKFVQIPFHKLIAAIENKCVKEGIRFLKQEESYTSKASFLDKDPVPTWSKDDGTQYRFSGKRITRGLYQSKSGTCIHADINGALNTLEKSRVVELDDNLKVKTPILLEVQKRKAVASRIA

SEQ ID NO: 5629 - protein, 450 aa, unidentified
MARKKAVKVLRKQKKKETMQRFTQKQNIGRACLTAKEFRLLQRMSHSSKALRNVGLYTIKQSYLIHNKMATVKEVDTAMQADTNYWGIQSNSVQAIRRALYAEVNSFFKALEQWKKNPEKFTGRPKFPNYSRPTDKRIIEIYQVPKLDDNGYWMIPMNVAFRKKFGSIKIRMPKNLRNKKISYIEIVPKQEGRFFEVHYTYEVHVSQMKKQSTTTSNALSCDLGVDRLVSCVTNTGDTFLIDGKKMKSINQYFNKMIRNLQLKNMGNGLSKRVVTNQMAALWHKRERQINGYISQTVGLLFKKVKAFGIDTVVVGYNAGWKQKSDMGKKNNQTFVQIPFHKLIAAIENKCVKEGVRFLKQEESYTSKASFLDKDPVPVWSKEDRTYRFSGKRITRGLYQSKAGTCIHADINGALNTLQKSRVVELDDNLKVKTPILLEVQKRKAVVSRIA

SEQ ID NO: 5630 - protein, 451 aa, unidentified
MARKKAVKVLRKQKKRENIQRFTQKQNIGRACLTAKEFRLLQRMSHSSKALRNVGLYTMKQSYLNHSKMATVKEVDTAMQADMNYSGMQSNSVQAIRRALYAEVKSFFKALEQWKKKPEAFTGRPRFPNYSRSTDKRIIEIYQVPKVDDNGYWMIPMNVAFRKKYGSIKIRMPRNIRNKKISYIEIVPKQKGRFFEVHYTYEMHVSQMKKQFTTTSNALSCDLGVDRLLSCVTNTGDAFLIDGKKLKSINQYFNKMIRNLQLENIENGLSKRVVTNEMAALWHKRERQISGYISQTVGLLFKKVKAFDIDTIVVGYNTGWKQKSDMGKKNNQKFVQIPFHKLIAAIENKCVKEGIRFFKQEESYTSKASFLDKDPVPVWSKDDKAHYHFSGKRITRGLYQSKAGTCIHADINGALNTLQKSRVVELDGNLKVKTPILLEVQKRKAVALRIA

SEQ ID NO: 5631 - protein, 419 aa, unidentified
MYVTQSNQIRGLSKEQFKQLKEMCHYAKNLYNVGLYNVRQHYFTEKSFLKYESNYHVSKTNENYKLLQAGVSQQILKVVDRSFKSFFNLMKKAKKGEYRFRDIKIPKYLKKDGLFTLIFSTNAMAIKDGYFRVPVSNLYKKLNSEYKDILIPFPSRLEGKKMKEVRIVPRNNGQFFNIQYVYEQPYETTELDVDKALAIDIGLNNLASCVDTDGASFLVDGKRLKSINRLYNKKKARLQSVAMKQGMKYTKQIGSITLKRNKQVNDYMKKSARIIINYCLKNKIGNLVVGYNDDFKRNINIGKKNNQQFTQISFGHLREQLLHLCERYGIEYVEQEESYTSKASFFDNDHLPKWKPADEEKHIFSGKRVKRGLYRTSTGYELNADVNGALNILRKSNLMDCKILQARGCLAHPLRIRVV

SEQ ID NO: 5632 - protein, 403 aa, unidentified
MQLVERHIIKQSHPNHSEIDQICFLSKNLYNAANYLIRQTLFKTGEILNYNQVQKVLQTEVDYKQLPAKVSQQVLMVLDKNWKAFREATKAYHKNPSKFLGKPKLPKYKDKIKGRNLVIYTIQALSKVGLNKGLIKPSQTNISLPTQQTMIAQVRIVPKLNHYIIEVIYNKKEKEKLPDNNRIASIDLGLNNLASVTFNQAGLKPFLINGRPLKSINHFFNKRKSELQSILKTGTSKKLQKLCTKRNFKVDDYLHKASRYLIKKLVSLNISTLVIGQNEGWKQEINIGSRNNQNFVQIPHSRFIQQLTYKAELEGITVIIQEESYTSKSSFLDQDEIPVYKKDVKYSFSGKRIKRGQYLSSNGSLINADVNGSLNILRKAIPKAFAEGIKGIVVSPVKVKLLK

SEQ ID NO: 5633 - protein, 451 aa, unidentified
MAKKKAVKVLRKQKKRETLRRFTQKQNIGRACLTAQEFRLLQRMSHSSKALRNVGLYTMKQSYLNHNKMATVKEVDTAMQADMNYWGIQSNSVQAIRRALFTEVKSFFKALEQWKKNPEKFTGRPKFPNYSHSTDKRIIEIYQVPKVDENGFWIIPMSVAFRKKFGSIKIRMPKNLRNKNISYIEIVPKQKGRFFEVHYTYEMHVSQMKKQPMTTSNALGCDLGVDRLVSCVTNTGDAFLIDGKKLKSINQYFNKTIRNLQQKNVENGLSKRIVTNKIAALWHKRERQIYGYIAQTVGLLFKKVKEFDIDTIVVGYNAGWKQNSHMGKKNNQKFVQIPFHKLIAAIENKCIKEGIRFFKQEESYTSKASFLDKDPVPVWSKDDRTQYRFSGKRITRGLYQSKAGTCIHADINGALNTLQKSQVVELDGNLKVKTPILLEVQKRKAVASRIA

SEQ ID NO: 5634 - protein, 451 aa, unidentified
MTRKKAVKVLRKQKKRETMQRFTQKQNIGRACLTAKEFRLLQRMSHSSKALRNVGLYTMKQNYLNYNKMATVKEVDTTMQADMNYWGIQSNSVQAIRRALYAEVKSFFKAMEKWKKNPEKFTGRPKFPNYSRSTDKRIIEIYQVPKVDDNGYWMIPMSVAFRKKFGSIKIRMPKNLRNKNISYIEIVPKQKGRFFEVHYTYEMHVSQMKKQSATTSNALSCDLGVDRLVSCVTNTGDTFLIAGKKLKSINQYFNKMIRNLQQKNIENGLSKRVVTNQMAALWHKRERQINGYISQTVGLLFKKVKAFGIDTIVVGYNVGWKQRSDMGKKNNQTFVQIPFHKLIAAIENKCIKEGIRFLKQEESYTSKASFLDKDPVPVWSKDDKTYYRFSGKRITRGLYKSKAGTCIHADINGALNTLKKSRVVELDESLKVKTPILLEVQKRKAVASRIA

SEQ ID NO: 5635 - protein, 458 aa, unidentified
MNYKTIRILLTNNISDECNDYLQFTCEQSNKLYNSTVFLIRQSHFEDCPRNIYFDKNDLLRSSFKLRKVKANYPNLCKELKTNVHYQAIGGSQGQQTIKSVAEAFKAYNQLLSLWFKGEIEHKPKMPSYRKNGLYAVSFTKQQIKITIDGYCRLPIPKTQKDELVTKELIIPSAKGVNSHNIAEVRIVPSLGKLWAEFVYKTPEVKATELNYSQALGIDTGVSNLITAVSTKGKSFILCGKRLKFINQKYNKTVAQYKNGKSEFYWDEFLDEITHKRNCQVKDSINKYARFIINYCLNNRIGDIVFGWGQGVKSNANLGKRNNQNFVQLPTVRLKNRIKELADEVGIRFTETEESYTSKSSFLDNDLLPKYGEKPREYKFSGKRINRGLYKTAKSYLINADCNGAINILKKVSTQLGITLAEVSKEALTLPKRYNVNSLTKVYRKRSEQVLTCVATSA

SEQ ID NO: 5636 - protein, 413 aa, unidentified
MYLTQKNQIRGLKANEFTALKELCRLSKNLYNVGLYTVRQYYFQERKHLKYESNYHYCKGNENYRMLNTDIAQQTLKVVDRTFRSFYGLITSVKSGSYSSKVRLPHYLPKEGYFPLIMPRVKVKDGKFRIPMSTAFKAQYGEIWIPFPNRLNQETLKEVRILPKYNGRFFEVEFISEAEETPIETKAESAIGIDLGLDNLATCIDTNGASFILDGKPLKSFNQWFNKENARLQSIKDLQKIKGTTERQARLAVNRNAKVRDYLNKAARYVINHCIEHRIDKLVVGFNIEMKQSINIGSRNHQNFVQIPHSSLRFKLKALCERYGIKYVEQEESYTSKASFLDNDNIPVFNADNPKKHEFSGKRIQRGLYRTQFGILVNADCNGAANILKKSKHNALSGVSSGCLAQPLRVKIS

SEQ ID NO: 5637 - protein, 406 aa, unidentified
MQLTERHIIKKTHKHYREIDRLCFLSKNLYNVANYLIRQSFFKTGEILNYNQTQKLLQSQFDYKNLPAKVSQQILMILDKNWKAFFQAQKAYQENPSKFLGKPKLPKYKHKENGRNLLVYTIQALSKPFLCKGLIKLSQTEIVFPTQAKKIAQVRIIPKLNHYVIEVIYHQEEKPKQVDNKRIASIDLGLNNLATVTFNQAGLIPFLPFLINGRPLKSINHFFNKKKAELQAILKTTTSKRLQNLCIKRNFKVDDYLHKASRYLINKLVELNIGTLVIGKNEGWKQELNIGSKNNQNFTQIPHTRFIEQLTYKAELEGISVIITEESYTSKSSFLDQDVLPTYKKGENHSFSGKRIKRGLYKSAQGILVNADVNGSLNILRKAIPNAFADGIKGIVVSPVKVTLSK

SEQ ID NO: 5638 - protein, 451 aa, unidentified
MARKKAVKVLRKQKKRENIQRFTQKQNIGRACLTAEEFRLLQRMSHSSKALRNVGLYTMKQSYLNDNKMATVKEVDTAMQADINYWGMQSNSVQAIRRALFTEVKSFFKAMEQWKKNPEKFTGRPKFPNYSRSTDKRIIEIYQVPKVDENGYWMIPMNVAFRKKFGSIQIRMPKNLRNKEISYIEIVPKQKGRFFEVHYTYDMHVSQMKKPSTTTSNALSCDLGVDRLLSCVTNTGDAFLIDGKKLKSINQYFNKMIRNLQQKNMENGLSKRVVTNQMAALWHKRERQINGYISQTVGLLFKKVRAYNIDTVVVGYSAGWKQKADMGKKNNQTFVQIPFHKLMAAIENKCIKEGIRFLKQEESYTSKASFLDKDPVPVWSKEDRTHYRFSGKRITRGLYQSKAGTCIHADINGALNTLEKSKVVELDDNLKVKTPILLKVQKRKAVASRIA

SEQ ID NO: 5639 - protein, 451 aa, unidentified
MARKKTVKVLRKQKKRETMQRFTQKQHIGRACLTAKEFRLLQRMSHSSKALRNVGLYTIKQSYLNDNRVATVKEVDNAMQADMNYSGVQSNSVQAIRRALFTEVKSFFKALEQWKKHPDKFTGRPKFPNYSRPTDKRIIEIYQVPKVDDNGYWIIPMNIAFRKKFGSIRIRMPKNVRNKKISYIEIVPKQTGRFFEVHYTYEMHVSQMKKQPTTTSNALGCDLGVDRLVSCVTNTGDTFLIDGKKLKSINQYFNKTIRNLGLKNMENGLSKRVVTNKMAALWHKRERQIHGYIAQTVGLLFKKVKEFDIDTIVVGYNAGWKQKSHMGKKNNQTFVQIPFHKLMAAIENKCVKEGIRFLKQEESYTSKASFLDKDPVPVWAKNDRTQYRFSGKRITRGLYQSKAGTCIHADMNGALNTLRKSRVVELDDNLKVKTPILLEVQKRKAVASRIA

SEQ ID NO: 5640 - protein, 411 aa, unidentified
MKLVERHIISQNHPLWSEIDHYAFLSKNLFNLANYHYRQYFFENSQKLSFNQLYHLVSKTSDYLALPTKVSKQIIRRLDQAWVSYFAAFKAWKKHPEKFLGKPKIIKYKDKTKGRNLLIYSQESIYKKPLKEGICHLSMSELKMTTSRREIIEVRIVPKSSCYVIEIVYERRSETTDKQEIAGVDLGVNNLMAVTTNQTGVAPLLVNGRPLKAINTFYNKQRSRLQSQLKTQNNQPSSKRLLFLTHKRNCRVENYLHTASKRVIDWCTIHQIGTLIIGHNERIKQSLNLGKRNNQQFVNIPHNRLIEMLTYKAQLKGIKVIITEESYTSQSSALDRDELPKYGEEKPLFKGKRLARGLYKMGTNQLLNADVNGAFNIIRKVIPDVIDQGIKGLPFNPVVLDPLRMTKLSGF

SEQ ID NO: 5641 - protein, 431 aa, unidentified
MFGCQQVLIKADKETRSIIEYLGRESNSLYNCSVYYARQIWLKTGKIVTGFALTKEMKFNPHFKAGYASSMQQTCLNVGESFKSFKKLLKKSIKGELNQKPNVPKYRKSGGLFTVTYPKKWLKLIEGKIRFPLGEQVRAWFGLTEFFLPFPVNLKWELIKEVRIVPRNTCLYAEFVDQQIHCELKEGRSLPTHLDSTKVLGIDHGLNNWLTCVSNIETSFIIDGKHLKSVNQWYNKQIATLKEGKPKGFWSRTLAHVTEKRNQQMRDAVNKAARIVINHCFIHGIGTIVFGWNQGQKNESNMGAKNNQKFVQIPTAKLKERIVQLGEQYDIKFVETEESYTSKASFLDNDELPKYGEKPDGWQSSGKRIKRGLYRTADNWLVNADCNGGANILRKVKTMLKLDLSRVTRGILTMPIRIRFWSNSVLESASL

SEQ ID NO: 5642 - protein, 451 aa, unidentified
MARKKVVKVLRKQKKRETMQRFTQKQNIGRACLTAKEFRLLQRMAHSSKALRNVGLYTIKQSYLNDNKMATVKEVDNAMQADMNYSGVQSNSVQAIRRALFTEMKSFFKALEQWKKHPDKFTGRPKFPNYSRSTDKRIIEIYQVPKVDENGYWMVPMNVAFRKKFGSIKIRMPKNLRNKNISYIEIVPKQKGRFFEVHYTYEMHVSQVKKQPTTTSNALSCDLGVDRLVSCVTNTGYAFLIDGKKLKSINQYFNKTIRNLQLKNMENGLSKRLVTNKIAALWHKRERQINGYIAQTVGLLFKKVKEFDIDTIVVGYNAGWKQKSHMGKKNNQTFVQILFEKLMAAIENKCIKEGIRFFKQEESYTSKASFLDKDPVPVWSKDDKTQYRFSGKRITRGLYQSKAGTCIHADINGALNTLKKSKIVELDDNLKVKTPILLEVQKRKAIASRIA

SEQ ID NO: 5643 - protein, 411 aa, unidentified
MKLVERHIISQNHPLWSEIDHYAFLSKNLFNLANYHYRQYFFENSQKLSFNQLYHLVSKTSDYLALPTKVSKQIIRRLEQAWVSYFAAFKAWKKHPEKFLGKPKIIKYKDKTKGRNLLIYSQESIYKKPLKEGICHLSMSDLKIPTSQREIIEVRIVPKSSCYVIEIVYERRSETTDKQQIAGVDLGVNNLMAVTTNQTGVAPLLVNGRPLKAINTFYNKQRSRLQSQLKTRNNQPSSKRLIFLTHKRNCRVENYLHTASKRVIDWCILHEIGTLIIGHNERMKQSLNLGKRNNQQFVNIPHYRLIEMLTYKAQLKGIKVIITEESYTSQSSALDRDELPKYGEEKPLFKGKRLARGLYKMGTNQLLNADVNGSFNIIRKVIPDVIDQGIKGLPFNPVVLDPLRMTKLSGF

SEQ ID NO: 5644 - protein, 411 aa, unidentified
MKLVERHIISQNHPFWSEIDHYAFLSKNLFNLANYHYRKYFFENSQKLSFNQLYHLVSKTSDYLALPTKVSKQIIRRLDQAWISYFAAFRAWKKHPEKFLGKPKIIKYKDKTKGRNLLIYSQESIYKKPLKEGICHLSMSDLKIITSLREIIEVRIVPKSSCYVIEIVYERRSETTDKQEIAGIDLGVNNLMAVTTNQTGVAPLLVNGRPLKAINTFYNKQRSHLQSQLKTQNNQHSSKRLILLTHKRNCRVENYLHTASKRVIDWCIIHQIGTLIIGHNERIKQSLNLGKRNNQQFVNIPHYRLIEMLTYKAQLKGIKVIITEESYTSQSSALDRDELPKYGEEKPLFKGKRLARGLYKMGTNQLLNADVNGAFNIIRKVIPDVIDQGIKGLPFNPVVLDPLRMTKLSSF

SEQ ID NO: 5645 - protein, 451 aa, unidentified
MARKKAVKVLRKQKKRETMQRFTQKQNIGRACLTAKEFRLLQRMAHSSKALRNVGLYTIKQSYLNDNKMATVKEVDNAMQADMNYSCVQSNSVQAIRRALFTEMKSFFKALEQWKKHPDKFTGRPKFPNYSRSTDKRIIEIYQVPKVDENGYWIIPMNVAFRKKFGSIKIHMPKNLRNKKISYIEIVPKQKGRFFEVHYTYEMHVSQMKKQPTTTSNALSCDLGVDRLVSCVTNTGDAFLIDGKKLKSINQYFNKVIRNLQQKNMENGLSKRVVTNQMAALWHKRERQIHGYISQTVGLLFKKVKAFGIDTIVVGYNAGWKQKSDMGKKNNQKFVLIPFHKLIVAIENKCIKEGIRFVKQEESYTSKASFLDKDPVPVWSNGDKTHYLFSGKRITRGLYQSKTGTCIHADINSALNTLQKSRIVEWDDNLKVKTPILLKVQKRKAVASRIA

SEQ ID NO: 5646 - protein, 451 aa, unidentified
MARKKAVKVLRKQKKREKMQRFTQKQNIGRTILTAKEFRLLERMSHSSKALRNVGLYTMKQSYLNNNRMATVKEVDTAMQADMNYSGVQSNSVQAIRRALFTEVKSFFKAMEQWKKHPDKFTGRPKFPNYSRSTDKRIIEIYKVPKVDYNGYWIIPMNVAFRKKFGSIKIRMPKNLRHKKISYIEIVPKQKGRFFEVHYTYEMHVSQMKKPSTTTSNALSCDLGVDRLVSCVTNTGDAFLIDGKKLKSINQYFNKTIRNLQQKNMENGLSKRVVTNKIAALWHNREKQINGYISQAVGLLFKKVKEFDIDTIVVGYNAGWKQKSHMGKQNNQKFVQIPFHKLIAAIENKCIKEGIRFLKQEESYTSKASFLDKDPVPVWSKDDRTQYRFSGKRITRGLYQSKAGTCIHADINGALNTLKKSKIVELDENLKVKTPILLEVQKRKAVTSRIA

SEQ ID NO: 5647 - protein, 451 aa, unidentified
MARKKVVKVLRKQKKRETMQRFTQKQNIGRACLTAKEFRLLQRMAHSSKALRNVGLYTIKQSYLNDNKMATVKEVDNAMQTDMNYSGVQSNSVQAIRRALFTEMKSFFKALEQWKKHPDKFTGRPKFPNYSRSTDKRIIEIYQVPKVDENGYWMVPMNVAFRKKFGSIKIRMPKNLRNKNISYIEIVPKQKGRFFEVHYTYEMHVSQVKKQPTTTSNALSCDLGVDRLVSCVTNTGYAFLIDGKKLKSINQYFNKTIRNLQLKNMENGLSKRLVTNKIAALWHKRERQINGYIAQTVGLLFKKVKEFDIDTIVVGYNAGWKQKSHMGKKNNQTFVQIPFEKLMAAIENKCIKEGIRFFKQEESYTSKASFLDKDPVPVWSKDDKTQYRFSGKRITRGLYQSKAGTCIHADINGALNTLKKSKIVELDDNLKVKTPILLEVQKRKAIASRIA

SEQ ID NO: 5648 - protein, 451 aa, unidentified
MARKKAVKVLRKQKKRENTQRFTQKQNIGRACLTAKEFRLLQRMSHSSKALRNVGLYTMKQSYLNHNRMATVKEVDTAMQNDMNYSGVQSNSVQAIRRALFTEVKSFFKALEQWKKNPEKFTGRPQFPNYSRSTDKRIIEIYQVPKVDENGYWMIPMNVAFRKKFGSIKIRMPKNLRNKNISYIEIVPKQKGRFFEVHYTYEMHVSQMKKPPTTTSNALSCDLGVDRLLSCVTNTGDAFLIDGKKLKSINQYFNKMICNLGQKNMDNGISKRIVTNKMAALWHKRERQINGYIAQTVGLLFKKVKEFDIDTIVVGYNAGWKQNSHMGKKNNQKFVQIPFQKLMAAIENKCVKEGIRFFKQEESYTSKASFLDKDPVPVWSKDDKTQYRFSGKRITRGLYQSKAGTCIHADINGALNTLKKSGVVQLDGNLKVKTPILLEVQKRKAIALCRA

SEQ ID NO: 5649 - protein, 414 aa, unidentified
MKLSFKFKPNISHKQLKIIEELSYHTTKLYNIINYDLREKGVKKTYYDIEKEYKSNWHCDFLHSHTRQQMFKVLEQNWKSYFASIKDFGINPSKYKAKPRPPKFKNVDKNKNEIIFTNLAIRYDNGLLKLSLSKAIKSLFNVESLNFEVSKKLQDIINWNSLQQARFNYDKVQKCWDLIVIYNKEELENHKTNVASIDLGLDNLATLTFKYGINQYIFCGKKLKSVNSYTNKQIAHLQSIEMFKYGSDKFKNTKRINKIRRYRNNYINDYMHKVSKAIINKAIENNVGKIVIGKLKGIKQNMDFNKTFVQVPIQSLAELICYKAKLQGIEVKFQEESYTSGCSALDLEPITKQNCDKSRRIVRGLFLSSYGLINSDINGSLNILRKSEKCIPDLIKLVRDNGKLDSPKRIRVAC

SEQ ID NO: 5650 - protein, 413 aa, unidentified
MKLSFKFKPNISKKQLEIIEELSYHTTKLYNIINYDLRENGAKTYYDIEKEYKSNWHCDFLHSHTRQQMFKVLEQNWKSYFASVEDFRVNPSKYKAKPRPPKFKNIDKNKNEIIFTNLAIRYDNGLLKLSLSKTIKSLFNVESLNFVVSKKLQSIINWNSLQQARFNYDKVQKCWYLIVIYNKKELENNKTNICSIDLGLDNIATLTFKYGLNQYIFCGKKLKSINSYTNKQIAHLQSIEMFKYGSDKFKNTKRINKIRRYRNNYINDYMHKVSKSIIDKAIENNVGKIVIGNLKGIKQNMDFNKSFTQIPIQRLAELISYKAKLQGIKVKFQDESYTSGCSALDLEVITKKNYDKSRRIVRGLFLSSYGLINSDINGSLNILRKSEKCIPDLIKLKRDNGKLDSPKRIRVAC

SEQ ID NO: 5651 - protein, 409 aa, unidentified
MTLTERHIIRPTHPIFKRIKDFCHLSKNLYNYANFILREHYFAGFKLPTAYDLINRFVKESQRDYKALPAQSAQQVLMLLSQNWKSYLKALKAYKLKPSSFLARPKIPKFKPKDGVSIGVLTNQQTSFTKGRMTKIKFPKKANLKRLITKINPQTSRLKQVRLIPKTTCFIVEVVYEQTTHKLPQTHGIGIMGIDLGLNNFVTAIDNQSSPFIIKGGGVKSVNQWFNKLKAHYQAKAKTSNKRFWTKRLGKLALWRECKVNDFMHKASAYVVGHCLKKGISTIVIGKNDGWKQELKLGKRTNQNFTSIPYESFIEKLAYKCALVGITLHTTEERFTSKCDHLANEPMQHHEQYLGKRVKRGLFKSSIGKSLNADINGAIGILRKVFPDAVKTLRDSGVVFTPVKISLAF

SEQ ID NO: 5652 - protein, 409 aa, unidentified
MTLTERHIIRPTHPIFKRIKDFCHLSKNLYNYANFILREHYFAGFKLPTAYDLINRFVKESQRDYKALPAQSAQQVLMLLSQNWKSYLKALKAYKLKPSSFLARPKIPKFKPKDGVSIGVLTNQQTSFTKGRMTKIKFPKKANLKRLITKINPQTSRLKQVRLIPKTTCFIVEVVYEQTTHKLPQTHGIGIMGIDLGLNNFVTAIDNQSSPFIIKGGGVKSVNQWFNKLKAHYQAKAKTSNKRFWTKRLGKLALWRECKVNDFMHKASAYVVGHCLKKGISTIVIGKNDGWKQELKLGKRTNQNFTNIPYESFIEKLAYKCALVGITLRTTEERFTSKCDHLANEPMQHHEQYLGKRVKRGLFKSSIGKSLNADINGAIGILRKVFPDAVKTLRDSGVVFTPVKISLAF

SEQ ID NO: 5653 - protein, 409 aa, unidentified
MTLTERHIIKPTHPIFKRIKDFCHLSKNLYNYANFILREHYFAGFKLPTAYDLINRFVKESQRDYKALPAQSAQQVLMLLSQNWKSYLKALKAYKLKPSSFLARPKIPKFKPKDGVSIGVLTNQQTSFTKGRMTKIKFPKKANLKRLITKINPQTSRLKQVRLIPKTTCFIVEVVYEQTTHKLPQTHGIGIMGIDLGLNNFVTAIDNQSSPFIIKGGGVKSVNQWFNKLKAHYQAKAKTSNKRFWTKRLGKLALWRECKVNDFMHKASAYVVGHCLKKGISTIVIGKNDGWKQKLKLGKRTNQNFTSIPYESFIEKLAYKCALVGITLHTTEERFTSKCDHLANEPMQHHEQYLGKRVKRGLFKSSIGKSLNADINGAIGILRKVFPDAVKTLRDSGVVFTPVKISLAF

SEQ ID NO: 5654 - protein, 451 aa, unidentified
MARKKAVKVLRKQKKRETIQRFTQKQNIGRSCLTAKEFRLLQRMSHSSKALRNVGLYTIKQSYLNHNKMATVKEVDTAMQADMNYSGIQSNSVQAIRRALFTEVKSFFKAMEQWKKNPEKFTGRPKFPNYSRSTDKRIIEIYQVPKVDDNGYWMIPMNVAFRKKFGSIKIRMPKNLRHKKISYIEIVPKQKGRFFEVHYTYEMHVSQMKKLSTTTSSALSCDLGVDRLVSCVTNTGDTFLIDGKKLKSINQYFNKMICNLQQKNIENGLSKRIVTNRMAALWHKRERQINGYISQTVGLLFKKVKTFGIDTVVVGYNAGWKQKSDMGKKNNQQFVQIPFHKLIAAIENKCVKEGIRFLKQEESYTSKASFLDKDPVPVWTKDDKTHYHFSGKRISRGLYQSKAGTCIHADINGALNTLQKSKVVELDGNLKVKMPILLEVQKRKAVASRIA

SEQ ID NO: 5655 - protein, 451 aa, unidentified
MARKKAVKVLRKQKKREKIQRFTQKQNIGRACLTAKEFRLLQRMSHSSKALRNVGLYTIKQSYLSHNKMATVKEVDTAMQADMNYWGMQSKSVQAIRRALYAEVKSFFKALEQWKKKPETFTGRPKFPSYSRSTDKRIIEIYQVPKVDDNGYWTIPMNVAFRKKFGSIKIRMPKNLRNKKISYIEIVPKQKGRFFEVHYTYEMHVSQMKQPFTTTSNALSCDLGVDRLISCVTNTGDSLLIDGKKLKSINQYFNKMIRNLQQKNMENGLSKRVVTNKMAALWHKRERQINGYISQTVGLLFKKVKACNIDTVVVGYNAGWKQKSDMGKKNNQQFVQIPFHKLIAAIENKCVKEGIRFLKQEESYTSKASFLDKDPVPVGSKDDRTHYRFSGKRITRGLYQSKSGKCIHADINGALNTLKKSKVVELGDNLKVKTPILLEVQKRKAVASRIA

SEQ ID NO: 5656 - protein, 451 aa, unidentified
MARKKAVKVLRKQKKRETMQRFTQKQNIGRACLTAKEFRLLQRMSHSSKALRNVGLYTIKQSYLNHNKMATVKEVDTAMQVDMNYWGIQSNSVQAIRRTLFTEVKSFFKAWEQWKKNPEKFTGRPKFPNYSGPIDKRIIEIYQVPKVDNNGYWMIPMNVAFRKKFGSIKIRMPKNLRHKKISYIEIVPKQKGRFFEVHYTYEMHVSQMKKQSTTTSNALSCDLGVDRLVSCVTNTGDAFLIDGKKLKSINQYFNKMICNLQQKNMENGISKRVVTNQMAALWHKRERQINGYISQTVGLLFKKVKAFGIDTVVVGYNAGWKQKSDMGKKNNQKFVQIPFHKLIAAIENKCIKEGIRFLKQEESYTSKASFLDKDPVPVWSKDDRTHYRFSGKRITRGLYQSKAGTCIHADINGALNTLKKSRVVELDDNLKVKTPILLEVQKRKAVASRIA

SEQ ID NO: 5657 - protein, 451 aa, unidentified
MARKKAVKVLRKQRKRENMQRFTQKQNIGRACLTAKEFRLLQRMSHSSKALRNVGLYTMKQSYLNHNKMATVKEVDTAMQADMNYWGIQSNSVQAIRRALYAEVKSFFKAWEQWKKKPETFTGRPKFPNYSRSTDKRIIEIYQVPKVDDNGYWMIPMNVAFRKKFGSIKIRMPKNLRNKKISYIEIVPKQKGRFFEVHYTYEMHVSQMKKSSTTTSNALSCDLGVDRLVSCVTNTGDTFLIDGKKLKSINQYFNKMIRNLQQKNMDNGISKRIVTNQMAALWHKRERQINGYISQTVGLLFKKVKACNIDTVVVGYNAGWKQKSDMGKKNNQKFVQIPFHKLIAAIENKCVKESIRFLKQEESYTSKASFLDKDRIPVWSKDDGTHYRFSGKRITRGLYQSKAGTCIHADINGALNTLQKSRVVEWDDNLKVKTPILLEVQKRKAVASCIA

SEQ ID NO: 5658 - protein, 451 aa, unidentified
MARKKAVKVLRKQKKRETMQRFTQKQNIGRACLTAKEFRLLQRMSHSSKALRNVGLYTIKQSYLNNNRMATIKEVDTAMQADMNYWGVQSNSVQAIRRALFTEVKNFFKALEQWKKNPEKFTGRPKFPNYSRSTDKRIIEIYQVPKVDENGYWIIPMNVAFRKKFGSIQIRMPKNLRHKKISYIEIIPKQKGRFFEVHYTYEMHVSQMKKQSTTTSNALSCDLGVDRLVSCVTNTGDAFLIDGKKLKSINQYFNKMIRNLQLKNVENGLSKRIVTNKMAALWHKRERQINGYLSQTVGLLFKKVKELDIDTIVVGYNAGWKQKSDMGKKNNQKFVQIPFHKLIAAIENKCVKEGIRFLKQEESYTSKASFLDKDPVPVWSKDDRRQYLFSGKRITRGLYQSKAGKCIHADINGALNTLQKSKVVEWDENLKVKTPILLEVQKCKAVASCIA

SEQ ID NO: 5659 - protein, 437 aa, unidentified
MQGLLKNNRWFSTYLTQKNHLRVDKKIYKILRTLTHLSKSLYNLTLYAVKQHYKLNGTFLPYAKAYHLVKDSEPYKLLPSQAAQQTMKIVERNFRSFFHVLNERKKGNYNRPVRPPKYLPKDGHFVLIFPYQSFRIKGDKIILSLGRNFARKYGVKHLEFALPKNVKGHRIKEVRILPRYNALWFEIEYVYEVEPEKRELDYSKYLAIDLGVNNFATCVSTIGTAFIIEGRGLKSFNRWWNKEKARLQSQYDRQGVKFGKKMAWLLRKRRNVVNDFMDKAVSHIVNYCLENGIGNIVIGELKGIKQNANLGDKNNQNFQYIPFGLFKRKLKAKCERYGINYVEVDEAYTSKVDALALEPIEKRGKYLGRRVKRGLFQSSTGVLINADVNGALNILRKVAGDSPVRAIAGSGRVNRPVRVRLPWGGLTPHETPSARAG

SEQ ID NO: 5660 - protein, 451 aa, unidentified
MARKKAVKVLRKQKKRENMQRFTQKQNIGRACLTAKEFRLLQRMSHSSKALRNVGLYTIKQSYLNDHRVATVKEMDNAMQADMNYSGVQSNSVQAIRRALFTEVKSFFKALEQWKKHPDKFTGRPKFPNYSYSTDKRIIEIYQVPKLDENGYWIIPMNVAFRKKFGSIKIRMPKNLRNKKISYIEIVPKQKGRFFEVHYTYEMHISQMKKQSTTTSNALSCDLGVDRLVSCVTNTGDAFLIDGKKLKSINQYFNKMIRNLQLKNMENGISKRVVTNRMAALWHKRERQINGYIAQTVGLLFKKVKEFDIDTIVVGYNAGWKQKSHMGKKNNQKFVQIPFEKLIAAIENKCIKEGIRFLKQEESYTSKASFLDKDPVPVWSKDARTQYRFSGKRITRGLYQSKAGTCIHADMNGALNTLKKSGVIELDDNLKVKTPILLEVQKRKAVASRIA

SEQ ID NO: 5661 - protein, 424 aa, unidentified
MFGCQQVLIKPDKELKAVLEFICGESNKLHNCAVYYARQMYFKARVYVRPFDLINELKRNPHYGALCAQAAQQTCGAVGESVKSFKGLIKLFREGGLEHRPKFPNYRTKDGLHLIAYPKQALGKKLIDGQISIPLGQKVQTWFGVKNFTIQMPSNLDYAVVREVRILPRNGQFYAEFVYKTEAVYSDVDPKKVLGIDHGIDNWLTCVSNVGSSFIVDGRHLKALNQWYNKRVSTLMDGKSNGFWSHQLARITEKRNRQMRDAVNKAARLVVTHCLENRIGTVVFGWNKRQKDSASMGRKTNQKFVQIPTARLKKRIEQLCEQYGLQFVETEESYTSKASFIDRDFLPTIGAKPDEWKESGRRVKRGLYRTGLQNWYINADCNGAANIIRKVATMLGLDLNGVSRGVLTAPLKVRLWTLQESPRL

SEQ ID NO: 5662 - protein, 407 aa, unidentified
MRLVERHIIKIGHQFYKEIDDLAWRSKNLYNYANYLVRQSFINEGKYLNNAAIFHLVKQHESYMALPRKISNQVLMILHRNWRSFFEAQIAYNQNPSKFRGRPKLPKYKDKTKGRNLVIYELGAISKKALKKGLIKLSQTSIEFPTSVSDVLEARIIPKCGQYVIEIVYNKEVTPEELNPDLVAGIDIGLDNLAALTSNKLGFKPVLVNGRPLKSINQQYNKVKASLQSQLKGNAKTSKRINALACKRNNQVDNYLHNASRWIINHLVTQGIGTLVIGKNDQWKQEINLGSTTNQNFVSIPHARFIEQLRYKAELVGISVLINEESYTSASSFLDSDPIPVYKKGQKHIFSGKRIKRAWYKSADGKLIHADINASLNITRKVIPAAFGLGIAGIAVCPFRVTPGKVA

SEQ ID NO: 5663 - protein, 410 aa, unidentified
MKYETRVEQHQITTQDNRYKEADNLCFLSKNLYNATLYAVRQYYFKNKKYLRYYDVNKQFTHSNNSDYRALPAKVSKCTQRLVDKNFKSFFNLRRKGYFARIPKYLDTENGKQIVHYEKKAISFVKRKGYIHLSKTNIFIKTNLTKEEVQFVRIIPKGNHIVFEIGYNKLIEEKKKDNGRYASIDLGINNLMTVSSNVFTPFIINGKPVKSMNVYYNKLLARNKKLLWKLNRQKSSHRLCSIHRKRMNKVKDYFHKSTHYVVNQLVSNQVNTLVIGYNKGWKQDTTMRKSSKQTFIQIPFYTLIQMLTYKCQEKGINVIIQEESYTSKSSFLDLDEIPVWDSKKNTITFYGKRVKRGLYQSKEGKLINADLNGSLNILRKYLEKQEAWNEKLFSNLVEVCSKPLLIRVSL

SEQ ID NO: 5664 - protein, 409 aa, unidentified
MTLTERHIIRPTHPIFKRIKDFCHLSKNLYNYANFILREHYFAGFKLPTAYDLINRFVKESQRDYKALPAQSAQQVLMLLSQNWKSYLKALKAYKLKPSSFLARPKIPKFKPKDGVSIGVLTNQQTSFTKGRMTKIKFPKKANLKRLITKINPQTSRLKQVRLIPKTTCFIVEVVYEQTTHKLPQTHGIGIMGIDLGLNNFVTAIDNQSSPFIIKGGGVKSVNQWFNKLKAHYQAKAKTSNKRFWTKRLGKLALWRECKVNDFMHKASTYVVGHCLKKGISTIVIGKNDGWKQELKLGKRTNQNFTNIPYESFIEKLAYKCALVGITLRTTEERFTSKCDHLANEPMQHHEQYLGKRVKRGLFKSSIGKSLNADINGAIGILRKVFPDAVKTLRDSGVVFTPVKISLAF

SEQ ID NO: 5665 - protein, 409 aa, unidentified
MTLTERHIIRPTHPIFKRIKDFCHLSKNLYNYANFILREHYFAGFKLPTAYDLINRFVKESQRDYKALPAQSAQQVLMLLSQNWKSYLKALKAYKLKPSSFLARPKIPKFKPKDGVSIGVLTNQQTSFTKGRMTKIKFPKKANLKRLITKINPQTSRLKQVRLIPKTTCFIVEVVYEQTTHKLPQTHGIGIMGIDLGLNNFVTAIDNQSSPFIIKGGGVKSVNQWFNKLKAHYQAKAKTSNKRFWTKRLGKLALWRECKVNDFMHKASAYVVGHCLKKDISTIVIGKNDGWKQELKLGKRTNQNFTNIPYESFIEKLAYKCALVGITLHTTEERFTSKCDHLANEPMQHHEQYLGKRVKRGLFKSSIDKSLNADINGAIGILRKVFPDAVKTLRDSGVVFTPVKISLAF

SEQ ID NO: 5666 - protein, 409 aa, unidentified
MTLTERHIIRPTHPIFKRIKDFCHLSKNLYNYANFILREHYFAGFKLPTAYDLINRFVKESQRDYKALPAQSAQQVLMLLSQNWKSYLKALKAYKLKPSSFLARPKIPKFKPKDGVSIGVLTNQQTSFTKGRMTKIKFPKKANLKRLITKINPQTSRLKQVRLIPKTTCFIVEVVYEQTTHKLPQTHGIGIMGIDLGLNNFVTAIDNQSSPFIIKGGGVKSVNQWFNKLKAHYQAKAKTSNKRFWTKRLGKLALWRECKVNDFMHKASAYVVGHCLKKGISTIVIGKNDGWKQELKLGKRTNQNFNNIPYESFIEKLAYKCALVGITLRTTEERFTSKCDHLANEPMQHHEQYLGKRVKRGLFKSSIGKSLNADINGAIGILRKVFPDAVKTLRDSGVVFTPVKISLAF

SEQ ID NO: 5667 - protein, 409 aa, unidentified
MTLTERHIIRPTHPIFKRIKDFCHLSKNLYNYANFILREHYFAGFKLPTAYDLINRFVKENQRDYKALPAQSAQQVLMLLSQNWKSYLKALKAYKLKPSSFLARPKIPKFKPKDGVSIGVLTNQQTSFTKGRMTKIKFPKKANLKRLITKINPQTSRLKQVRLIPKTTCFIVEVVYEQTTHKLPQTHGIGIMGIDLGLNNFVTAIDNQSSPFIIKGGGVKSVNQWFNKLKAHYQAKAKTSNKRFWTKRLGKLALWRECKVNDFMHKASAYVVGHCLKKGISTIVIGKNDGWKQELKLGKRTNQNFTNIPYESFIEKLAYKCALVGITLRTTEERFTSKCDHLANEPMQHHEQYLGKRVKRGLFKSSIGKSLNADINGAIGILRKVFPDAVKTLRDSGVVFTPVKISLAF

SEQ ID NO: 5668 - protein, 409 aa, unidentified
MTLTERHIIKPTHPIFKRIKDFCHLSKNLYNYANFILREHYFAGFKLPTAYDLINRFVKESQRDYKALPAQSAQQVLMLLSQNWKSYLKALKAYKLKPSSFLARPKIPKFKPKDGVSIGVLTNQQTSFTKGRMTKIKFPKKANLKRLITKINPQTSRLKQVRLIPKTTCFIVEVVYEQTTHKLPQTHGIGIMGIDLGLNNFVTAIDNQSSPFIIKGGGVKSVNQWFNKLKAHYQAKAKTSNKRFWTKRLGKLALWRECKVNDFMHKASAYVVGHCLKKGISTIVIGKNDGWKQELKLGKRTNQNFTSIPYESFIEKLAYKCALVGINLHTTEERFTSKCDHLANEPMQHHEQYLGKRVKRGLFKSSIGKSLNADINGAIGILRKVFPDAVKTLRDSGVVFTPVKISLAF

SEQ ID NO: 5669 - protein, 409 aa, unidentified
MTLTERHIIRPTHPIFKRIKDFCHLSKNLYNYANFILREHYFAGFKLPTAYDLINRFVKESQRDYKALPAQSAQQVLMLLSQNWKSYLKALKAYKLKPSSFLARPKIPKFKPKDGVSIGVLTNQQTSFTKGRMTKIKFPKKANLKRLITKINPQTSRLKQVRLIPKTTCFIVEVVYEQTTHKLPQTHGVGIMGIDLGLNNFVTAIDNQSSPFIIKGGGVKSVNQWFNKLKAHYQAKAKTSNKRFWTKRLGKLALWRECKVNDFMHKASAYVVGHCLKKGISTIVIGKNDGWKQELKLGKRTNQNFTNIPYESFIEKLAYKSALVGITLHTTEERFTSKCDHLANEPMQHHEQYLGKRVKRGLFKSSIGKSLNADINGAIGILRKVFPDAVKTLRDSGVVFTPVKISLAF

SEQ ID NO: 5670 - protein, 409 aa, unidentified
MTLTERHIIKPTHPIFKRIKDFCHLSKNLYNYANFILREHYFAGFKLPTAYDLINRFVKESQRDYKALPAQSAQQVLMLLSQNWKSYLKALKAYKLKPSSFLARPKIPKFKPKDGVSIGVLTNQQTRFTKGRMTKIKFPKKANLKRLITKINPQTSRLKQVRLIPKTTCFIVEVVYEQTTHKLPQTHGIGIMGIDLGLNNFVTAIDNQSSPFIIKGGGVKSVNQWFNKLKAHYQAKAKTSNKHFWTKRLGKLALWRECKVNDFMHKASAYVVGHCLKKGISTIVIGKNDGWKQELKLGKRTNQNFTNIPYESFIEKLAYKSALVGITLHTTEERFTSKCDHLADEPMQHHEQYLGKRVKRGLFKSSIGKSLNADINGAIGILRKVFPDAVKTLRDSRVVFTPVKISLAF

SEQ ID NO: 5671 - protein, 353 aa, unidentified
MSKTTKNMGCQQVLLHPDQNLLAILKYLCGEANKVFNCSVYYARQVWFKENRFLTQGELCRQMKWNVHFNAMYASSAQQICNGIVESFRSFKQLLKLFGKGELANQPKPPKYRKPGLFTVSYPKKWLKLTDIGIKVPLGRKVKAWFRLDAFYIPMPSNLDWNLIKEIRIMPRHGCFYAEFVYEMKTQSVKLDPNQALSIDHGLDNWLTCVDTQGHSFIVDGKHLKSKNQWYNKHIATLKKNKPQDFWSKRLACITEKRNRQMRDAVNKTARLVINHCLKYGIGTIVFGWNKGQKQSIELGSKINQKFVQIPTAKLKERIEQLCNLYGLKFVETEESYTSKASFLDDDFLPIRA

SEQ ID NO: 5672 - protein, 338 aa, unidentified
MFKSGQLTQKPKPPKYRKKYGLAVVSYPARWVKLVNEMLKFPLGKQVKAWFGIDHFLLPMPLNLDFKQIKEFRFVPRNNCFYLEFVYDQPEPKKGQLIAENVLGIDPGLNNWLTCVSNVGKAFIVDGKKVKSQNQWYNKQVAKIKAGKPGDYWDDNLAAITEKRNRQMRDNVNKAARFVVNWCIEHQIGTVVFGWNKRQKDSINIGKKNNQQFVQIPTAKLKARIAELSEQYGIKFVETEESYTSKASFLDDDFLPTFGEKPKRWEPSGKRVNRGLYRSSTGKLINADANGAANILRKVSTQLEINLAKVCRGVLMLPQRYKLDNLTQKYRQQCVAWQ

SEQ ID NO: 5673 - protein, 428 aa, unidentified
MYGCQQHLVKNTSEVMAVLEYLCTEANKLTNCGIYYCRQMLFKAGRFVSKAELDFELKSNLHFKAMRSACAQQTLHSVIESFNSYARLAKMFTSGELAQKPKPPKYRKKNGLAVVSYPARWVKLVNGMLKFPLGKQVKAWFGIDHFLLPMPSNLDFNQIKELRFVPRNNCFYLEFVYEQPTLEKGQPIAENVLGIDPGLNNWLTCVSNVGKAFIVDGKKVKSQNQWYNKQVAKIKSGQSGDYWDDNLAAITEKRNRQMRDNVNKAARFVLNWCIEHQIGTIVFGWNQRQKDSINIGKKNNQQFVQIPTAKLKARIAELSERYGIKFVETEESYTSKASFLDEDFLPTFGEKPKRWEPSGKRVNRGLYRSATGKLINADANGAGNIIKKVATQLSLDLAKVGREVLMLPQRYKLDDLTRKYRKQCVAWQ

SEQ ID NO: 5674 - protein, 408 aa, unidentified
MRLVERHIIQKNHRFYPEIDRLCFLSKNLYNYANYLVRQSFIFENNYRHYYDLQKTLSTQPDYQAMPAKVSQQILMILDRNWKSFLAASEVYQQNPSKFNARPRIPGYKNKITGRNIVVYTTQAISKRQLKQGIINPSKTGIYLKTLVPTSQIKQVRLVPRLNHYVIEVIYEKCEKQYELEKNRCASIDIGLNNLATLTFNQAGIKPLLINGRPLKSINQYYNKVKSLLQSQLRENQSSKRLKKLCNKREFKINDYLHKSSRLIINTLINQKIGTLIIGHNEEWKQKINLGKRNNQNFVCVPYNKLIEILSYKAKMVGIDVIITEESYTSKASFIDNDLIPVYKEGENNHVTFSGKRVKRGLYRTTSIGLINADVNGSLNIMKKAVPNVFDHGIEGVVVHPVRITPAK

SEQ ID NO: 5675 - protein, 430 aa, unidentified
MFGCQQSLIHTSKDIQAIIEYLCRESNKVFNCAVYYARQIYFKAHKYVTKAELDNELKNNRHFQAMYSQAAQQTCHSVFEGFKSFKALNKLFRQGKLVEKPRPPKYRKRGLNIVSYPKQALKLIGNNIRIPLGSKVKAWFGMDSFTLALPSNLEFKDIRELRLLPRNQCFYAEFVYKLETVEAHLNPDNALGIDPGMDNWLTCVSTTGTSFIIDGKHVKSLNRWYNKKVSTIKDNKPQGFWSKKLAHLTEQRNRQMRDAVNKAAILVINHCLENNIGTIVFGWNQGQKHESNLGSKNNQKWVQVPTARLKERISQLCEQYGIRFVETEESYTSKASFVDGDYLPSYGEKPDNWKPSGKRVKRGLYRTALNWYINADCNGASNILRKVSGMLGINLSGLSRVPLTAPQRVSLWSAKKTRRDGVLTRPEVSA

SEQ ID NO: 5676 - protein, 398 aa, unidentified
MILVERHIIKQSHQHWQEIDQLSFLSKNLYNVANYICRQHFFATGKKYSLPELYHLVKDYVDYHALPTKVSKQIIKRLVSTWTGYFEAHKEWKKNPSKLLGEPRIPGYKDKTKGRNAVIYYHESVYKAELKKGICHLSMSDIKIPTKVDNVIEVRLVPRPTYYVVEIVYEKEEQEQCTSNYVAGIDIGLTNLVTLTSNQPGFKPLLVNGRPLKSVNQFYNKTKAKLQAQLGDKHKTSKRIQLMTAYRNNYVDNYLHNTSRTIVNLLKTCDIGTLVIGKNDNWKQNINIGKKNNQSFTQIPHARLIDQLTYKCQLAGIKVVVTEESYTSKCSALDLEPIQKHSSYLGKRVKRGLFKSAQGILLNADCNGSANIVRKVFPNAFANGIESVAVTPIKVMPL

SEQ ID NO: 5677 - protein, 411 aa, unidentified
MKLVERHIITKNHPLWSEIDHKAFLSKNLFNLANYHYRQHFFQHQQKLNFNQLYHLLSQTPDYKALPTKVSKQIIRRLDSAWTSYFQAVKTWQIHPEKFLGKPKIPGYKHKTKGRNILPYSHESISKKALKKGICHLSMSEIQIPTSPHEILEARIVPKSSCYVIEIVYEKVEETTNERQIAGIDLGVNNLMAVTTNQTGVRPLLIKGRPLKAINTFYNKQRSCLQSQLKIKHYQTQSHRLKKLTHKRNCRVENYLHTASRRAIDWCKQHQIGILVIGHNPTWKQSVNLGRRNNQQFVDIPHYRLIEMLTYKAELKGILVVITEEAYTSRASALDGDDVPKYGENKPVFQGHRIARGLYKTAQGRLLNADVNGSFNVTRKVIPDVLNQGIKGLPFNPVVLDPLRTTRPPSL

SEQ ID NO: 5678 - protein, 412 aa, unidentified
MKLVERHIITKNHPLWSEIDHLAFLSKNLFNLANYHYRQHFFQHQQKLNFNQLYHLVSQTPDYKALPTKVSKQIIRRLDTAWTSYFQAVKTWHIHPEKFGSKPRIPGYKHKTRGRNILPYPNEAISKKALKKGICHLSMSEIKIATSQKQIQEARIVPKTSCYVLEIVYEKNEETTNHQQIAGIDLGVNNLMAVTTNQTGIRPMLIKGRPLKAINTFYNKKRSALQSQLKLKHNQTQSHRLKKLTHKRNCRVENYLHTASRRVIDWCREHQIGIIVIGHNATWKQSINLGQRNNQQFVNIPHERLIEMLTYKAQLKGIQVIITEESYTSQSNALDGDALPKYGEKKPVFQGHRVARGLYKTANGRLLNADVNGSFNITRKVIPDVLDQGIKGLPFNPVVLDPLRMTALSACE

SEQ ID NO: 5679 - protein, 434 aa, unidentified
MFGCQQVLIKPDRDLKAVLEFICGESNKLHNCAIYYARQMYFKADKYVKPFDLNNELKRNPHYSALCAQAAQQVCGAVGESVKSFQGLLKLFNEGGLANRPKFPNYRTKNGLHLIAYPKQALGKKLVDGQIAIPLGRRVQTWFGIKNFLLTMPSNLEYSDIRELRILPRNGCFYAEFVYKVDAVDALLDPLKALGIDSGLNNWLTCVSNVGTSFIVDGLHLKSLNRWYNKQISTLKDGKPPGFWSNRLAAITEKRNRLLRDAVNKAARQVIEHCDKNGIGTVVFGWNKGQKDSANMGAKTNQKFVQIPTARLKDRIKQLCEHYGIQFVETEESYTSKASFVDRDELPTFGEKPEGWQAAGKRIKRGLYRTAQNWYINADCNGAANILRKVSMTLGLDLNGVSRGALTRPTRISFWVTAKKTLIGTGLPSLVASA

SEQ ID NO: 5680 - protein, 412 aa, unidentified
MKLVERHIITKNHPLWSEIDHKAFLSKNLFNLANYHYRQYFFTHQEKLNFNQLYHLLSQTSDYKALPTKVSKQIIRRLDTAWTSYIQAVKNWQKHPEKFLGKPKIPGYKHKTKGRNILPYPHEAISKKALKKGICQLSMSELKIPTSAHVIIEARIVPKSSCYVLEIVYEKEEETTNHQQIAGIDLGVNNLMAVTTNQTGVRPLLMNGRPLKAINTFYNKQRSCLQSHLKLQHNQTQSQRLKKLTHKRNCRVENYLHTASRRVIDWCREHQIGIIVIGYNATWKQSINLGQRNNQQFVNIPHYRLVEMLTYKAQLKGIQVIITEESYTSQSSALDGDALPKYGEKKPVFQGHRVARGLYKTAQGRLLNADVNGSFNITKKVIPDVLDQGIKGLPFNPVVLDPLRMTGLSAFE

SEQ ID NO: 5681 - protein, 403 aa, unidentified
MKLAERHIIKKPHKNYQEIDRLCFLSKNLYNAANYLIRQSFFETGKILNYNQTQKLLQSEFDYKNLPAKVSQQILIILDKNWKAFLQAQKAYQENPSRFLGQPKLPKYKHKENGRNLLVYTIQALSKPFLSKGLIKLSQTEIVFPTKAKEIAQVRVIPKLNHYVVEVIYNQEEKPKQADNKKIASIDLGLNNLASVTFNQAGLIPFLINGRPLKSINHFFNKKKHQLQAILKTRTSKKLQTLCAKRNFKVDDYLHKASRYLINKLIELDIGTLVIGKNEGWKQELNIGSKNNQNFTQIPHTRFIEQLTYKAELEGISVIITEESYTSKSSFLDQDVLPIYKKGENHSFSGNRIKRGLYKSAQGILVNADVNGSLNILRKAIPNAFADGIKGIVVSPVKVKLSK

SEQ ID NO: 5682 - protein, 423 aa, unidentified
MRLVQRHIIRPDHKYYQYFDQQCYLSKNLYNLSTYRYRQHFFQTGQKLSFNDLYHQVSKTSAYYALPNTKVAKQIIRRIDQSWKGYFQAHKDWKRNPSKYLGEPKIPKYKDKEKGRYLLVFPIETISKPYLRKGIAKLTTCPIEFLTGLTEVVEVRVIPKTGCYVVEIVYEQESLKPSTDKAIAGGDIGLVNLITLTSNQTGTKPLLIKGGALKAINTNYNKKKAKLQQELEVKHGKKTSKRLNALTHKRNCRVDNYLHTVSRRVIDWCLLNSIGTLVIGKNDHWKQSINIGKKNNQQFVSIPHARLIEMLCYKGELMGIKVVVTEESYTSQSSFLDFDTLPSYGEKKPKFSGKRIKRGLYKTSTGKLINADVNGSYNCIRKHLQQEKVKSNAFHSHDLMALPFMPVTYDPLRTHNLNFLQIV

SEQ ID NO: 5683 - protein, 458 aa, unidentified
MNYKTIRILLKNNISDECNDYLQFTCEQSNKLYNSTVFLIRQSHFEDCPRNIYFDKNDLLRSSFKLRKVKANYPNLCKELKTNVHYQAIGGSQGQQTIKSVAEAFKAYNQLLSLWFKGEIEHKPKMPSYRKNGLYAVSFTKQQIKITIDGYCRLPIPKTQKDELVTKELIIPSAKGVNSHNIAEVRIVPSLGKLWAEFVYKTPEVKATELNYSQALGIDTGVSNLITAVSTKGKSFILCGKRLKFINQKYNKTVAQYKNGKSEFYWDEFLDEITHKRNCQVKDSINKYARFIINYCLNNRIGDIVFGWGQGVKSNANLGKRNNQNFVQLPTVRLKNRIKELADEVGIRFTETEESYTSKSSFLDNDLLPKYGEKPREYKFSGKRINRGLYKTAKSYLINADCNGAINILKKVSTQLGITLAEVSKEALTLPKRYNVNSLTKVYRKRSEQVLTCVATSA

SEQ ID NO: 5684 - protein, 431 aa, unidentified
MYGCQQILIHADKELKAILDFTCSESNKLSNCAIYYARQIWFKAKRYINKFELNNELKSNRHFQVLYSQAAQQVCGSVYESFASFKQLNVLYRRGELADKPKPPKYRKNGCNLVSYPKQALRLKDGQIRIPLGSQVKAWFKLDSFFLPMPSNLRFEDIKELRILPRNRCFYAEFVYKTSAVKSDVDKSNVLGIDHGLNNWLTCVSNVGTSFIVDGKHIKSLNRWYNKQVATIKDNKPQGFWSNKLAAISEKRNRQIRDAINKVARIVVNHCLDNRIGRIVFGWGQGLKQEINLGKKRNQQFVQIPTARLKERIKQLCQQYDIEFVETEEANTSAASYVDGDTLPKHGEKPEGWKSSGRRVKRGLFRTAMNWYINADCNGAANIIRKVSTTLGLDLGGVSRGALTHPTRIYVWVTAKKKRSNVSLDHCKVSV

SEQ ID NO: 5685 - protein, 416 aa, unidentified
MYGCQQVLIHTSPDIKAIIEYLCLESNKVYNCALYYARQMLFKKQVFVSRGAVCSEMSKSANLHFKAMYVSSAQQTCNSVAEAMSSYKELLKLWRTGKLEEKPRPPRYRKQGLFTVSYPVRWLKLTPEGVRIPLGNQVKAWFGIDSFLLPVPSNLNWDSIKEVRILPRNKCFYAEFVYLVQTEKIELDKNKVLGIDHGIDNWLTCVSNVGTSFIVDGKHLKSLNQWYNKQVADHKNGKPQGFWSNALSTLTEKRNRQFRDAINKAARLVINHCLKNSIGRIVFGWNKGQKDGAILGKKGNQNFIQIPTARLKSRIQELCSRYGIEFIETEESYTSKASFLDHDFLPEFGEKPDNWKPSGKRVKRGLYRTAFNQYINADCNAAVNIIRKVSATLGLNLNEVSRGALTTPLRVRIWTT

SEQ ID NO: 5686 - protein, 403 aa, unidentified
MQLVEKHIISKNHYLFKEADYLCFLSKNLFNYANYMIRQQFFATGEYLNYYSIQKRCQGTPDYIALPAKVAQQVLLRLHESWQSFLSANQEYKKYPEKFQSRPQIPKYKHKTLGRNVVTYTAQAVSQTALKRGLIHLSKTQIVLTTQVKDVCQVRIVPGLAHYKIEVVYSAPENPVKTKSGGIAGLDIGLNNLATVTANKQDFQPLIINGKPLKSINAYFHKKRAALQSLLAPKQKTSHQISRLTHKRNCKIDNYLHNASRWLIDHLVANSIETLVIGKNDHWKTGINLGKRTNQNMVSIPHARFIQMLTYKAQLVGIKVVLITEEYTSKCSFLDQEPLCKLEVYQGRRIHRGLFRSGNGTLINADVNGSLNIIRKAFPNAFSEGIQGVVVPPVRVTPYKMVG

SEQ ID NO: 5687 - protein, 451 aa, unidentified
MTRKKAVKVLRKQKKRENMQRFTQKQNIGRACLTAKEFRLLQRMSHSSKALRNVGLYTMKQSYLNHNRMATVKEVDTAMQNDMNYSGIQSNSVQAIRRSLFTEVKSFFKALEQWKKNPEKFTGRPKFPNYSRSTDKRIIEIYQVPKVDENGYWIIPMNVAFRKKFGSIQIRMPKNLRNKKISYIEIVPKQKGRFFEVHYTYEMHVSQMKKPSTTTSNALSCDLGVDRLVSCVTHTGDAFLIDGKKLKSINQYFNKMICNLQQKNMDNGISKRIVTNKIAALWHKRERQINGYIAQALGLLFKKVKEFDIDTVVVGYNTGWKHKSHMGKKNNQKFVQIPFQKLIAAIENKCVKEGIRFFKQEESYTSKASFLDKDPVPVWSKDDKTQYRFSGKRITRGLYQSKAGTCIHADINGALNILKKSGVVELDENLKVKTQILLEVQKRKAIASRIA

SEQ ID NO: 5688 - protein, 451 aa, unidentified
MTRKKAVKVLRKQKKRENMQRFTQKQNIGRACLTAKEFRLLQRMSHSSKALRNVGLYTMKQSYLNHNRMATVKEVDTAMQADTNYWGVQSNSVQAIRRALFTEVKSFFKALEQWKKNPEKFTGRPKFPNYSRSTDKRIIEIYQVPKVDENGYWMIPMNVAFRKKFGSIKIRMPKNLRNKNISYIEIVPKQKGRFFEVHYTYEMHVSQMKKPSTTTSNALSCDLGVDRLVSCVTHTGDAFLIDGKKLKSINQYFNKMICNLQQKNMDNGISKRIVTNKIAALWHKRERQINGYIAQALGLLFKKVKEFDIDTVVVGYNTGWKHKSHMGKKNNQKFVQIPFQKLIAAIENKCVKEGIRFFKQEESYTSKASFLDKDPVPVWSKDDKTQYRFSGKRITRGLYQSKAGTCIHADINGALNILKKSGVVELDENLKVKTQILLEVQKRKAIASRIA

SEQ ID NO: 5689 - protein, 432 aa, unidentified
MYGCQQNLINPDEDLKSILEFICSESHKLTNCGIYYGRQLFFQAQKIIGKYDLEKEYKSNKHYQVLHSQAAQQILRSVAESFKSFKELDKKYKKGNLHFKPRVPSYRKKDGLAMITYPKQALRLVGEHIRIPLGTTVKRWFKLDSFLIPMPSNLQFVDIKELRILPRNRCFYVEFVYKKEIVVQYELKPKNVLGIDPGISNWLSCVSNVGTSFIVDGRKLKSFNQWYNKRVSTLKEGKPQGYWDHQLAHITEKRNRQMRDAVNKAACLVVNHCIEHQIGMVVFGWNQGQRQEVNLGKVTQSFVQIPTAKLKERVKQMCSEHSIKFVESEESYTSKASFLDGDQLPTFGEKPEGWKPSGKRVKRGMYRTNKGLLVNADLNGAANILRKVETQLGVNLAKVCRRVLTLATRFRIWETKAKKRSGTDLSCHVATA

SEQ ID NO: 5690 - protein, 451 aa, unidentified
MARKKAVKVLRKQKKRENMQRFTQKQNIGRACLTAKEFRLLQRMSHSSKALRNVGLYTIKQSYLNNNKMATVKEVDTAMQADMNYWGIQSNSVQAIRRALFTEVKSFFKALEQWKKKPETFTGSPKFPNYSRSTDKRIIEIYQVPKVDDNGYWMIPMNVAFRKKFGSLKIRMPKNLRNKKISYIEIVPKQKGRFFEVHYTYEMHVSQMKKKSTTTSNALSCDLGVDRLLSCVTNTGDAFLIDGKKLKSINQYFNKMIRNLQRGNMENGLSKRVVTNKMAALWHKRERQINGYISQTVGLLFKKVKACNIDTVVVGYNAGWKQKSDMGKKNNQKFVQIPFHKLISAIENKCIKEGIRFLKQEESYTSKASFLDKDPIPVWSKEDRTHYRFSGKRITRGMYQSKSGKCIHADINGALNTLQKSRVVELDENLKVKTPILLEVQKRKAVASRIA

SEQ ID NO: 5691 - protein, 451 aa, unidentified
MVKKKAVKVLRKQKKRETMQRFTQKQNIGRACLTAKEFRLLQRMSHSSKALRNVGLYTIKQSYLNNNKMATVKEVDTAMQADMNYSGVQSNSVQAIRRALFTEVKSFFKALEQWKKKPETFTGRPKFPNYSRSTDKRIIEIYQVPKVDDNGYWMIPMNVAFRKKFGSIKIRMPKNVRNKKISYIEIVPKQKGRFFEVHYTYEMHVSQMKKPSTTTSNALSCDLGVDRLVSCATNTGDTFLIDGKKLKSINQYFNKMIRNLQLKNMENGLSKRVVTNQMAALWHKRERQINGYISQTVGLLFKKVKACNIDTVVVGYNAGWKQKSDMGKKNNQKFVQIPFHKLIAAIENKCIKEGIRFLKQEESYTSKASFLDKDKVPVWSKEDRTHYHFSGKRITRGLYQSKAGTCIHADINGALNTLQKSKVVELDENLKVKTPILLEVQTRKAVASRIA

SEQ ID NO: 5692 - protein, 412 aa, unidentified
MKLVERHIITKNHPLWSEIDHKAFLAKNLFNLANYHYRQHFFVHHQKLNFNQLYHLLSQTSDYLALPTKVSKQIIRRLDSAWTSYYQAVKVWQKHPEKFKSQPKIPGYKHKTKGRNILPYPHESISKKALKKGICQLSMSEIQIPTSQTEIIEARIVPKSSCYIIEIVYEKVESTTNHQQIAGIDLGVNNLMAVTTNQTGVSPMLIKGRPLKAINTFYNKQRSGLQSALKLKHNQTQSQRLKNLTHKRNCRVDNYLHTASKRVIDWCREHHIGILVIGHNANWKQEINLGKRNNQQFVNIPHYRLIEMLTYKAQLTGIRVVITEESYTSMASATDGDALPKYGDKKPVFQGNRIARGLYKTASGKLLNADVNGSFNITRKVIPDVLDQGIKGLPFNPVVLDPLRMTGLSACE

SEQ ID NO: 5693 - protein, 400 aa, unidentified
MYLVEKHIIDKHHRYWHEVDNNSFLAKNLFNYANYLIRQKFIFSHEYINYNTVQKICQSTSDYQALPPKVSQQVLIRLSESWQSFKKATNEYFLHPEKFLARPKLPKYKHKQSGRFVVTYTNQAVSKKQLKKGFINPCGTQIYLPTKVDNVHQVRVIPRTDHYVIEVVYFKNEIAKKPDNTYIAGVDIGLDNLAAITANSNSFQPILLNGKPLKNINAYYNKKKAGLQSRLGGDRKTSTRIQKLTHKRNCKIIDYLHKASRLIVDYLAANRIGTLVIGKNDLWKQSINLSNRTNQNFVCIPHARFIEMLTYKCQLVGISVVTTSENYTSKCSFPDFEPIEKREVYLGKRVKRGLFRASNGFLINADCNGSGNILRKVVPNAFVEGIEGVVVSPVRITPHK

SEQ ID NO: 5694 - protein, 425 aa, unidentified
MPYGCQQILISPDNNLKALLEYVCTEANSLINCGVYYSRQYYFKTGNFPSKADLHKQLGTIQKNKHYQALYSDTAQQILTGVAESFKSYLGLLKGIKKGTVTQKPRLPNYRVSGGLALATFTGRSLRLKDGKIRFPLGSLVKTWFGVDAFHLPMPSNLDFKSIREVRILPRNRCFYAEFVYKQQVETIELDKSKVLGIDHGINNWLTCVSNVGTSFIVDGLHLKSLNQWYNKSVAKIKENKSQGFWSNRLAAITEKRNRQMRDAVNKAARIVINYCVENNIGSIVFGWNQGQKNGADMGKKNNQKFVQIPTAKLKTRIEQLCEQYGIDFIETEESYTSKTSFLDNDVLPTIGAKPQGWKSSGIRTNRGLFKTLAGIKINADCNGAANIIRKVATIFKFDLSGVGRGCLSQPKKVYLWTIQKSQCL

SEQ ID NO: 5695 - protein, 392 aa, unidentified
ESNKVYNCALYYARQILFKTGTFVKRAAICSEMSRSSNRHFKPMYVSSAQQTCNNVAEAMSSYKELLKLWKSGKLIEKPRPPKYRKKGFFTVSYPVKWLKLTPEGIRIPLGQQVKAWFGIGEVYLPMPSNLEWKDIKEIRILPRNRCFYAEFVYAVKTEKTPINPNHVLGIDHGIDNWLTCVSNVGTSFIVDGKHLKSLNQWYNKQVANQKQGKPHGFWSKSLAVITEKRNRQIRDGINKAARLVINHCLENNIGRIVFGWNQGQKDGATLGKKGNQNFIQIPTARLKSRIQELCSRYGIEFIETEESYTSKASFLDQDYLPEFGAKPDNWEPSGKRVKRGLYRTAFNQYINADCNGAANILRKVSATLGLNLNGVSRGALTTPLRIRFWCS

SEQ ID NO: 5696 - protein, 416 aa, unidentified
MYGCQQVLIHTSPDIEAIIEYLCSESNKIYNCALYYARQMFFKKQVFVNRGAVCSEMSKSANLHFKAMYVSSAQQTCNSVVEAMSSYKELLKLWRTGKLEEKPRPPQYRKQGLFTVSYPVRWLKLTPEGIRIPLGNQVKAWFGIDSFLLPMPSNLNWNSIKEVRILPRNQCFYAEFVYLVQTENIELDKNKVLGIDHGIDNWLTCVSNIGTSFIVDGKHLKSLNQWYNKQIADHKNGKPQGFWSNALSALTEKRNRQVRDAINKAARVVINPCLKNSIGRIVFGWNKGQKDGATLGKKGNQKFIQIPTARLKSRIQELCSRYGIEFIETEESYTSKASFLDHDFLPEFGEKPDNWKPSGKRVKRGLYRTAFNQYVNADCNAAANIIRKVSATLGLNLNGVSSGALTTPLRVRIWTT

SEQ ID NO: 5697 - protein, 416 aa, unidentified
MYGCQVNLIHVNPQTRAVCEYLCSESNKVYNCALYYARQMFFKTGAFVKRAAICSEMSQNSNKHFKAMYVSSAQQTCNNVAEAMSSYKELLKLWRSGKLTEKPRPPKYRKKGLFTVSYPVRWLKLTPEGIRIPLGQQVKAWFGIGEIYLPMPSNLEWKDIKEVRILPRNRCFYAEFVYPVKAEKIPVNPSYVLGIDHGINNWLTCVSNVGTSFIVDGKHLKSLNQWYNKQVSNQKQGKPQGFWSKSLALVTEKRNRQVRDGINKAARLVINHCLKNNIGRIVFGWNQGQKDGATLGKKGNQNFIQIPTARLKSRIQELCSRYGIEFIETEESYTSKASFLAQDYLPEFGAKPDNWEPSGKRVKRGLYRTALNQYINADCNASANILRKVSATLGLNLDGVSSGALTTPLRILLWNS

SEQ ID NO: 5698 - protein, 443 aa, unidentified
MYLTQKNQIRELNKSEFVALRELCRLSKNLYNVGLYTVRQYFFQERKHLRYESAYHLCKTNENYKFLNTDIAQQTLKVVDRTFKSFYGLISAVKNGSYQQKVKLPNYLPKDGYFLLIIPCGWMTRKDKPKTPRLAIKNGRFRVPMSNEFKKQHGEIWVNFPKRINYESLKEIRIHPKYNARYFEVEFISEVDPEPIEVKSGSAISIDLGVDNLAACVDTNGASFLVDGKPIKSINQWFNKRNAKLQSIKDKQDIKGITNQQVKLTAKRNNQVRDYLNKTARFIVNHCIQNSIANLIVGYNPGIKQEINIGGRNNQNFVQIPFHSLRSKLKAMCERYGLNYQEQEESYTSSASAIDGDEIPVYNADNPAYYQFSGKRIKRGLYRTKDGHLVNSDLNGSLNIGIKSKHNGFVGVSRGSLIAPRRINLLKLEKWRATALASLGTTS

SEQ ID NO: 5699 - protein, 431 aa, unidentified
MYGCQQVLIHADKELKGILEFICSEANKLSNCAVYYARQIWFKAKRYITKFELDSEMKSNRHFQTLYSQAAQQLCRSVYESFASFKQLNALYNRGELADKPRPPKYRKNGFNLVSYPKQALRLKDGQIRIPLGSQVKVWLKLDSFTLPMPSNLRFEDIKELRILPRKRCFYAEFIYKINTVKSDVDKSRVLGIDHGLNNWLTCVSNVGTSFIIDGRHLKSLNRWYNKRVSTIKENKPQGFWSNNLADITEKRNRQIRDAINKVARIVINHCLDNRIGRVVFGWGQGIKQEIDLGKKRNQQFVQIPTARLKGRIEQLCQQHGIEFLETEEANTSAASFVDGDTLPKHGEKPDSWKSSGRRVKRGLFRTAMNWCINADCNGAANIIRKVSTKLGLDLSGVSRGALTHPTRIYIWVTAKKKRSNEALTRCVASS

SEQ ID NO: 5700 - protein, 403 aa, unidentified
MQLVEKHVIKQGHRFYQEIDQLCFLSKNLYNVGNYLIRQTFINSNESLSYYDIQKQLQSSVDYKALPSKVSQQVLMVLDRNWKSFKEALKSWFENPSRFLGKPKLPKYKHKTNGRNIVIYTKQALSKPALERGVIKPSKTNIELLTKSVNIAQVRIVPKLDHYVIEVVYNKEVEPASIDLNKIAAIDLGLSNLATVTFNQAGIAPLLINGSPLKAMNQFFNKQKANWQSIIGTGTTKRIQKLCTKRHHKVDDYMHKASRFIINKLLELGVGTLVIGKNETWKQEINIGSRNNQNFVQIPHSLFINKLTYKAELIGIKVLVTEESYTSKASFLDLDNIPTYQEGVKHTFSGKRIIRGLYKSADGRMINADVNGSYNIMRKAVPNAFANGIEGIVVCPVKVKLPN

SEQ ID NO: 5701 - protein, 451 aa, unidentified
MVKKKAVKVLRKQKKRENIQRFTQKQNIGRACLTAKEFRLLQRMSHSSKALRNVGLYTIKQSYLNYNKMATVKEVDNAMQADMNYWGIQSNSVQAIRRALFTEVKSFFKAWEQWKKNPETFTGRPKFPNYSRSTDKRIIEIYQVPKVDDNGYWMIPMNVAFRKKFGSIKIRMPKNLRNKKISYIEIVPKQKGRFFEVHYTYEMHVSQMKQQSTTTSNALSCDLGVDRLLSCVTNTGDTFLIDGKKLKSINQYFNKKIRNLQQKNIENGISKRVVTNRMAALWHKRERQVNGYISQTVGLLFKKVKAFDIDTIVVGYNTGWKQKSDMGKKNNQKFVQIPFHKLIAAIENKCIKEGIRFLKQEESYTSKASFLDKDPIPVWSKDDRAHYRFSGRRITRGLYQSKAGTCIHADINGALNTLEKSRVVELDDNLKVKTPILLEVQKRKAVASRIA

SEQ ID NO: 5702 - protein, 451 aa, unidentified
MARKKAVKVLRKQKKRENIQRFTQKQNIGRACLTAKEFRLLQRMSHSSKALRNVGLYTIKQSYLNNNKMATVKEVDTAMQADMNYWGIQSNSVQAIRRSLFTEVKSFFKGLEQWKKKPETFAGRPKFPNYSGSTDKRIIEIYQVPKVDDNGYWMIPMNVAFRKKFGSIKIRMPKNVRNKKISYIEIVPKQKGRFFEVHYTYEMHVSQMKKPSTTTSNALSCDLGVDRLLSCVTNTGDAFLIDGNKLKSINQYFNKMIRNLQLKNVENGLSKRVVTNKMAALWHKRERQINGYISQTVGLLFKKVKACNIDMVVVGYNTGWKQKSDMGKKNNQKFVQIPFHKLIAAIENKCIKEGIRFLKQEESYTSKASFLDKDKIPVWSKEDRTHYRFSGKRITRGLYQSKSGTCIHADINGALNTLEKSKIVQLDDNLKVKTPILLKVQKRRAFASRIA

SEQ ID NO: 5703 - protein, 409 aa, unidentified
MTLTERHIIRPTHPIFKRIKDFCHLSKNLYNYANFILREHYFAGFKLPTAYDLINRFVKESQRDYKALPAQSAQQVLMLLSQNWKSYLKALKAYKLKPSSFLARPKIPKFKPKDGVSIGVLTNQQTSFTKGRMTKIKFPKKANLKRLITKINPQTSRLKQVRLIPKTTCFIVEVVYEQTTHKLPQTHGIGIMGIDLGLNNFVTAIDNQSSPFIIKGGGVKSVNQWFNKLKAHYQAKAKTSNKRFWTKRLGKLALWRECKVNDFMHKASAYVVGHCLKKGISTIVIGKNDGWKQELKLGKRTNQNFTNIPYESFIEKLAYKCALVGITLHTTEERFTSKCDHLANELMQHHEQYLGKRVKRGLFKSSIGKSLNADINGAIGILRKVFPDAVKTLRDSGVVFTPVKISLVF

SEQ ID NO: 5704 - protein, 425 aa, unidentified
MTSKMYGCQQVLLSPDKELKAILEFICSESNKLTNCAIYYGRQIWFKCHGYLGKFDLINEYKTNPHYQVLHSQVAQQALLSVRESFKSFYELDNKYRKGELEDKPKSPKYRKKGGLSVVSYPKQALKLVDNQIQIPLGLTVNRWFGIKNFLITMPSNIKFEEIKELRILPRNGCFYAELAYKIKPVSVKLDSKLALGIDPGVTNWLTCVSNLGTSFIVDGRKLKSLNQWYNKIVSKLKEGKPQGFWSERLAHITEKRNRQMRDAVNKAARIVINYCISHRIGNIVFGWNKGNKNGINIGSQNNQTFVQIPTAKLKGRIAQLCQSYSINFVETEESYTSQSSFLDGDIVPVFGNKPEGWKSSGKRVFRGLFVTSKGIKVNADLNGCANILRKVKEQLNLDLAETIRGLLTITIASKKHRLASVYRN

SEQ ID NO: 5705 - protein, 432 aa, unidentified
MHLVEKHIILRSDPRYATLDAACFASKNLYNTALYEIRQAFIFEGKHLNYNEMDRRMQSHEAYKALPAKVAQQVLLLLERNWKSFFEALDAYKRDPSKFRRRPQFPKYKHKTTGRNVLIYTMQAVSRSKRTLGRHLIQPSGLGIQIKTQQDPKAITQVRVVPKHGFVVVEVIYEQEPSRSAVDPALIAGIDPGLENLIALTSNKPGFVPVVVNGRGLKSTNQFYNKRRAELQQALGRPGNTRRMERLTLWRNRRIEHDLHTISRFVIDVLVAEGIGTLVIGRNVGWKQEINLGKRTNQNFVQVPHAQFIQMLTYKAEQKGIQVILTEESYTSKASFLDRDPLPIYQQSQEHAPVFSGKRITRRLYRASNGQLIHADCNGSYNIIRKAAPDAFGSEGVEDGERRVHLPVVHPVRLSFPHKPAREKILASVRIR

SEQ ID NO: 5706 - protein, 432 aa, unidentified
MHLVEKHIILRSDPRYATLDAACFASKNLYNTALYEIRQAFIFEGKHLNYNEMDRRMQSHEAYKALPAKVAQQVLLLLERNWKSFFEALDAYKRDPSKFRRRPQFPKYKHKTTGRNVLIYTMQAVSRSKRTLGRHLIQPSGLGIQIKTQQDPKAITQVRVVPKHGFVVVEIIYEQEPSRSAVDPALIAGIDPGLENLIALTSNKPGFVPVVVNGRGLKSTNQFYNKRRAELQQALGRPGNTRRMERLTLWRNRRIEHDLHTISRFVIDVLVAEGIGTLVIGRNVGWKQEINLGKRTNQNFVQVPHAQFIQMLTYKAEQKGIQVILTEESYTSKASFLDRDPLPIYQQSQEHAPVFSGKRITRRLYRASNGQLIHADCNGSYNIIRKAAPDAFGSEGVEDGERRVHLPVVHPVRLSFPHKPAREKILASVRIR

SEQ ID NO: 5707 - protein, 432 aa, unidentified
MHLVEKHIILRSDPRYATLDAACFASKNLYNTALYEIRQAFIFEGKHLNYNEMDRRMQSHEAYKALPAKVAQQVLLLLERNWKSFFEALDAYKRDPSKFRRRPQFPKYKHKTTGRNVLIYTMQAVSRSKRTLGRHLIQPSGLGIQIKTQQDPKAITQVRVVPKHGFVVVEIIYEQEPSRSAVDPALIAGIDPGLENLIALTSNKPGFVPVVVNGRGLKSTNQFYNKRRAELQQALGRPGNTRRMERLTLWRNRRIEHDLHTISRFVIDVLVAEGIGTLVIGRNMGWKQEINLGKRTNQNFVQVPHAQFIQMLTYKAEQKGIQVILTEESYTSKASFLDRDPLPIYQQSQEHAPVFSGKRITRRLYRASNGQLIHADCNGSYNIIRKAAPDAFGSEGVEDGERRVHLPVVHPVRLSFPHKPAREKILASVRIR

SEQ ID NO: 5708 - protein, 432 aa, unidentified
MHLVEKHIILRSDPRYATLDAACFASKNLYNTALYEIRQAFIFEEKHLNYNEMDRRMQSHEAYKALPAKVAQQVLLLLERNWKSFFEALDAYKRDPSKFRRRPQFPKYKHKTTGRNVLIYTMQAVSRSKRTLGRHLIQPSGLGIQIKTQQDPKAITQVRVVPKHGFVVVEIIYEQEPSRSAVDPALIAGIDPGLENLIALTSNKPGFVPVVVNGRGLKSTNQFYNKRRAELQQALGRPGNTRRMERLTLWRNRRIEHDLHTISRFVIDVLVAEGIGTLVIGRNVGWKQEINLGKRTNQNFVQVPHAQFIQMLTYKAEQKGIQVILTEESYTSKASFLDRDPLPIYQQSQEHAPVFSGKRITRRLYRASNGQLIHADCNGSYNIIRKAAPDAFGSEGVEDGERRVHLPVVHPVRLSFPHKPAREKILASVRIR

SEQ ID NO: 5709 - protein, 432 aa, unidentified
MHLVEKHIILRSDPRYATLDAACFASKNLYNTALYEIRQAFIFEGKHLNYNEMDRRMQSHEAYKALPAKVAQQVLLLLERNWKSFFEALDAYKRDPSKFRRRPQFPKYKHKTTGRNVLIYTMQAVSRSKRTLGRHLIQPSGLGIQIKTQQDPKAITQVRVVPKHGFVVVEIIYEQEPSRSAVDPALIAGIDPGLENLIALTSNKPGFVPVVVNGRGLKSTNQFYNKRRAELQQALGRPGNTRRMERLTLWRNRRIEHDLHTISRFVIDVLVAEGIGTLVIGRNVGWKQEINLGKRTNQNFVQVPHTQFIQMLTYKAEQKGIQVILTEESYTSKASFLDRDPLPIYQQSQEHAPVFSGKRITRRLYRASNGQLIHADCNGSYNIIRKAAPDAFGSEGVEDGERRVHLPVVHPVRLSFPHKPAREKILASVRIR

SEQ ID NO: 5710 - protein, 432 aa, unidentified
MHLVEKHIILRSDPRYATLDAACFASKNLYNTALYEIRQAFIFEEKHLNYNEMDRRMQSHEAYKALPAKVAQQVLLLLERNWKSFFEALDAYKRDPSKFRRRPQFPKYKHKTTGRNVLIYMMQAVSRSKRTLGRHLIQPSGLGIQIKTQQDPKAITQVRVVPKHGFVVVEIIYEQEPSRSAVDPALIAGIDPGLENLIALTSNKPGFVPVVVNGRGLKSTNQFYNKRRAELQQALGRPGNTRRMERLTLWRNRRIEHDLHTISRFVIDVLVAEGIGTLVIGRNVGWKQEINLGKRTNQNFVQVPHAQFIQMLTYKAEQKGIQVILTEESYTSKASFLDRDPLPIYQQSQEHAPVFSGKRITRRLYRASNGQLIHADCNGSYNIIRKAAPDAFGSEGVEDGERRVHLPVVHPVRLSFPHKPAREKILASVRIR

SEQ ID NO: 5711 - protein, 409 aa, unidentified
MQLVERHIICKGDSRYTAIDAASFASKNLYNLANYHMRQSFIHMGKYLSSADVYHLVKDTDAYKALPRKVSNDVLRLLEKNWKAFRKGLAAWFEDPSKFEDRPKVPKYKDKQKGRNILIYDIQAISKKALKKRGMIAPSLLGIEIPTKQTHIKQARIIPRSGFYVVEVVYEQEPKQAAGDPLLVAGIDIGLNNLATLTSNKAGFTPWLVNGRPLKHINQWYNKERARLQSHLSKHKRHTSARLERLTNKRTRKIDHYLHTHSHRIIEHLREEGIGTVVIGKNDGWKQEINIGNRNNQQFVQIPFARFIEMLTYKAELVGIRIVLQEESYTSKCSFLDLEPICHHEHYLGKRIKRGLFRTSTGRRINADVNGSLNIIRKAIPESFEQGIEGVAVRPVGPPHTEQCLSLFR

SEQ ID NO: 5712 - protein, 303 aa, unidentified
MPIANSQRKELENPSVIIPSGANFQFLDIAEIRIVPQNGKLWAEYVYKTQLVKASNLDYLMLLPLIMGVDNWLSSVTTKGKSFIVNGRRIKSINQRYNRFVAKYKQGKSQDYWDDKLEQVTHRRNCQMRDAINKAARFVINYCLKHQIGNIVFGWNDRQKESINIGKTNNQNFVQIPTARLKNRIQQLAESVGIIFTEIDEAYSSKASFLDDDLVPNYGEKPKGYKFSGKRFKRGLYKTAKGWLVNADIQAAANLLKKVATQLGINLARVVKECLTVPKRYELDGLSRSYRKQAEMWLQPIEA

SEQ ID NO: 5713 - protein, 242 aa, unidentified
MSKNLFNLANYHIRQHFFNTRTVLSFTSLYHLVSKTDAYGALPNTKVAKQIIRRVHKAWIGYKQAHKDWQRHPEKYLGEPKIPKYKYKQNGRYIVVFPDETVSKPALRKGVVKLTPCPIEFNSGLRQVNEVRVIPRSGCYVVEIVYEQDRVASTTGDATAGVDIGLVNLVTLTTNQSGVKPLLIKGGALKAINTYYNKQKAKIQSELATKYQRKSSRRLESLTFKRNCRVDNYLHTVSLYSD

SEQ ID NO: 5714 - protein, 419 aa, unidentified
MIKCNKETKSIIEYLCFESNSLYNCSVYYARQIWLKTGKIVSGFDLTVEIKTNRHFNAGYASAMQQTCLNVGEAFQSFKKLLAKSKKGELDQKPKAPNYRKPGGLFTVTYPKRWLKLKDGFIRFPLGNQVKAWFGISEFFLPVPSNLEWSEIKEIRLLPRNRCFYAEFVYKTETAVVKLDKSKVLGIDHGLNNWLTCVSNVGTSFIVDGLHLKSLNQWYNKSVAKIKENKPQGFWSNRLAAITEKRNRQMRSGVNKAARIVITHCIENKIGSIVFGWNVGQKNSANMGVKTNQKFVQIPTAKLKNRIEQLCDQYGIEFIETEESYTSKTSFLDHDALPKYGEKPDGWKSSGRRLTRGIYQSFAGIKINADCNGASNILRKVSVMLGLDLSGISRGALSAPKKVLLWTLQKSPRLQTGEA

SEQ ID NO: 5715 - protein, 419 aa, unidentified
MIKCDKETKAIIEYLCYESNSLYNCAVYYARQMWLKTGKIVSGFDLTAEMKNNKHFHAGYASAMQQTCLNVGEAFKSFKKLLSKSKKGELAQKPKTPYYRKSGGLFTVTYPKRWLKLKDQFIRFPLGNQVKAWFGISEFFLPMPTNLDWADIKEIRLLPRNKCFYAEFVYQQSVEPIKLDQSTVLGIDHGLNNWLTCVSNVGTSFIVDGLHLKSLNQWYNKSVAKIKENKPHAFWSNRLAAITEKRNRQMRDAVNKAARIVINHCLDNHIGSVVFGWNKEQKNGADLGKNNNQKFVQIPTAKLKSRIEKLCEQYGIDFIETEESYTSKTSFLDNDVLPTIGAKPEGWKSSGVRPNRGLFKTGTGININADCNGAANIIRKVAMMAKFDLAGISRGCLSQPKKVLLWTLQKSPRLQTGEA

SEQ ID NO: 5716 - protein, 451 aa, unidentified
MARKKAVKVLRKQKKRETMQRFTQKQNIGRACLTAKEFRLLQRMSHSSKALRNVGLYTMKQSYLNNNKMATVKEVDTAMQADMNYCGIQSNSVQAICRALYAEVKSFFKALEQWKKNPEKFTGRPKFPKYSRSTDKRIIEIYQVPKVDDNGFWMIPMSVAFRQKFGSIKIRMPKNLRHKKISYIEIVPKQKGRFFEVHYTYEMHVSQMKKQSTTTSNALSCDLGVDRLVSCITNTGDTFLIDGKKLKSINQYFNKMICNLQQKNIENGISKRVVTNRMAALWHKRERQINGYISQTIGLLFKKVKAFGIDTIVVGYNVGWKQKSEMGKKNNQTFVQIPFHKLIAAIENKCVKEGIRFLKQEESYTSKASFLDKDPIPVWTKDDKTHYHFSGKRITRGLYQSKAGTCIHADINGALNTLQKSRVVELDDNLKVKTPILLEVQKRKAVASCIA

SEQ ID NO: 5717 - protein, 451 aa, unidentified
MAKKKAVKVLRKQKKRETIQRFTQKQNIGRACLTAKEFRLLQRMSHSSKALRNVGLYTIKQSYLNNNKMANVKEVDTAMQADMNYSGVQSNSVQAIRRALFTEVKSFFKALEQWKKKPETFTGRPKFPNYSRSTDKRIIEIYQVPKVDDNGYWMIPMNVAFRKKFGSIKIRMPKNLRNKKISYIEIVPKQKGRFFEVHYTYEMHVSQMKKPPTTTSNALSCDLGVDRLVSCVTNTGDTFLIDGKKLKSINQYFNKMIRNLQQKNMENGISKRIVTNKIAALWHKRERQINGYISQTVGLLFKKVKAFDIDTIVVGYNAGWKQKSDMGKKNNQKFVQIPFHKLIAAIENKCVKEGIRFLKQEESYTSKASFLDKDRVPVWSKDDRTQYRFSGKRTTRGLYQSKAGTCIHADINGALNTLQKSKVVELDDNLKVKTPILLEVQKRKAVASRIA

SEQ ID NO: 5718 - protein, 451 aa, unidentified
MARRKAVKVLRKQKKRETMQRFTQKQNIGRACLTAKEFRLLQRMSHSSKALRNVGLYTMKQSYLNNKKMATVKEVDSAMQADMNYWGMQSNSVQAIRRALFTEVKSFFKALEQWKKKPETFTGRPKFPNYSRSTDKRIIEIYQVPKVDENGYWMIPMNVAFRKKFGSIKIRMPKNLRNKKISYIEIVPKQKGRFFEVHYTYEMHVSQMKKPSTTTSNALSCDLGVDRLVSCVTNTGDTFLIDGKKLKSINQYFNKMICNLQQKNMDNGISKRIVTNRMAALWHKRERQINGYISQTVGLLFKKVKEFDIDTIVVGYNTGWKQKSDMGKKNNQKFVQIPFYKLIAAIENKCIKEGIRFFKQEESYTSKASFLDKDPVPVWSKDDSTHYRFSGKRITRGLYQSKAGTCIHADINGALNTLQKSRVVEWDDNLKVKTPILLEVQKRKAIASRIA

SEQ ID NO: 5719 - protein, 451 aa, unidentified
MARKKAVKVLRKQKKRETMQRFTQKQNIGRACLTAKEFRLLQRMSHSSKALRNVGLYTIKKSYLNHNKMATVKEVDTAMQADLNYSGIQSNSVQAIRRALFTEVKSFFKALEQWKKKPETFTGRPKFPNYSGSTDKRIIEIYQVPKVDDNGYWLIPMNVAFRKKFGSIKIRMPKNLRNKKISYIEIVPKQKGRFFEVHYTYEMHVSQMKKQSTTTSNALSCDLGVDRLVSCATNTGDAFLIDGKKLKSINQYFNKMIRNLQLKNMENGLSKRVVTNQMAALWHKRERQINGYISQTVGLLFKKVKACNIDTVVVGYNAGWKQKSDMGKKNNQKFIQIPFHKLIAAIKNKCVKEGIRFFKQEESYTSKASFIDKDPIPVWSKDDRTHYRFSGKRMTRGLSQSKAGTCIHADINGALNTLQKSRVVELDENLKVKTPILLEVQKRKAVASRIA

SEQ ID NO: 5720 - protein, 451 aa, unidentified
MVRKKAVKVLRKQKKRETMQRFTQKQNIGRACLTAKEFRLLQRMSHSSKALRNVGLYTIKQSYLNHNKMATVKEVDTAMQTDMNYWGIQSNSVQAIRRALFTEVKSFFKALEQWKKKPETFTGRPKFPNYSRSTDKRIIEIYQVPKVDDNGYWMIPMNVAFRKKFGSIKIRMPKNVRNKKISYIEIVPKQKGRFFEVHYTYEMHVSQMKKPSTTTSNALSCDLGVDRLVSCATNTGDTFLIDGKKLKSINQYFNKMIRNLQLKNMENGLSKRVVTNQMAALWHKRERQINGYISQTVGLLFKKVKACNIDTVVVGYNAGWKQKSDMGKKNNQKFVQIPFHKLIAAIENKFIKEGIRFLKQEESYTSKASFLDKDKVPVWSKEDRTHYHFSGKRITRGLYQSKAGTCIHADINGALNTLQKSKVVELDENLKVKTPILLEVQTRKAVASRIA

SEQ ID NO: 5721 - protein, 451 aa, unidentified
MAKKKAVKVLRKLKKRENLQRFTQKQNIGRACFTAKEYRLLQRMSHSSKALRNVGLYTIKQSYLKHNKMATVKEVDTAMQADMNYSGIQSNSVQAIRRALFTEVKSFFKALEQWKKKPETFAGRPRFPNYSGPTDKRIIEIYQVPKVDDNGYWMIPMNVAFRKKFGSIKIRMPKNLRNKKISYIEIVPKQKGRFFEVHYTYEMHVSQMKKQSTTTSNALSCDLGLDRLLSCVTNTGDTFLIDGKKLKSINQYFNKMIRNLQQKNMDNGISKRIVTNKMAALWHKRERQINGYISQTVGLLFKKVKACNIDTVVVGYNAGWKQKSDMGKKNNQKFVQIPFHKLIAAIENKCVKEGIRFLKQEESYTSKASFLDKDRVPVWSKDDRTHYRFSGKRITRGLYQSKTGTCIHADINGALNTLKKSRVVQLDENLKVKTPILLEVQKRKAVASCIA

SEQ ID NO: 5722 - protein, 451 aa, unidentified
MARKKAVKVLRKQKKREKMQRFTQKQNIGRTILTAKEFRLLERMSHSSKALRNVGLYTMKQSYLNNNRMATVKEVDTAMQADMNYSGVQSNSVQAIRRALFTEVKSFFKAMEQWKKHPDKFTGRPKFPNYSRSTDKRIIEIYKPPKVDDNGYWIIPMNVAFRKKFGSIKIRMPKNLRHKKISYIEIVPKQKGRFFEVHYTYEMHVSQMKKPSTTTSNALSCDLGVDRLVSCVTNTGDAFLIDGKKLKSINQYFNKTIRNLQQKNMENGLSKRVVTNKIAALWHNREKQINGYISQAVGLLFKKVKEFDIDTIVVGYNAGWKQKSHMGKQNNQKFVQIPFHKLIAAIENKCIKEGIRFLKQEESYTSKASFLDKDPVPVWSKDDRTQYRFSGKRITRGLYQSKAGTCIHADINGALNTLKKSKIVELDENLKVKTPILLEVQKRKAVTSRIA

SEQ ID NO: 5723 - protein, 451 aa, unidentified
MARKKAVKVLRKQKKRETMQRFTQKQNIGRACLTAKEFRLLQRMSHSSKALRNVGLYTIKKSYLNHNKMATVKEVDTAMQADLNYSGIQSNSVQAIRRALFTEVKSFFKALEQWKNKPETFTGRPKFPNYSGSTDKRIIEIYQVPKVDDNGYWLIPMNVAFRKKFGSIKIRMPKNLRNKKISYIEIVPKQKGRFFEVHYTYEMHVSQMKKQSTTTSNALSCDLGVDRLLSCVTNTGDAFLIDGKKLKSINQYFNKMIRNLQLKNVENGLSKRVVTNKMAALWHKREKQINGYISQTVGLLFKKVKAFNIDTVVVGYNTGWKQKSDMGKKNNQKFVQIPFHKLIAAIENKCVKEGIRFLKQEESYTSKASFLDKDRVPVWSKDDRTHYRFSGKRITRGLYRSKSGKCIHADINGALNTLEKSRVVELDENLKVKTPILLEVQKRKAVASCIA

SEQ ID NO: 5724 - protein, 394 aa, unidentified
MYLTQTNYIRHLPKDQYEAILEMCAYANNLYNVGLYQIRQYFFATNKYLRYEENYHLCKDNENYKLLQAGVSQQILRTCDHAFRSFFALLSKKKSGCYDKKVRIPHYRTKGGKYLLVLSANAISIKNGNLIVPMSRAFSKQHPDLDSICIPVPDRISGKHIAEVRIVPVLNGKALKIQYCYEQEDEPQNLNADNVLAIDVGLDNLASCVTTTGTSFIVDGRKLKSINQWYNKQLAHYASIKDHQNVKGFTARMSRITDKRNRQVTDYMHKAARHIVDYCIANDIGTLIVGHNADQKRAVNMGKANNQKFVQIPFDQLRTYLKTLCERYGIAYIETEESYTSKASFLDGDEIPVYDAKHPYTSSFSGKRIKRGLYRTKENTLVNADINGACNIAR

SEQ ID NO: 5725 - protein, 451 aa, unidentified
MARKKAVKVLRKQKKRETMQRFTQKQHIGRACLTAKEFRLLQRMSHSSKALRNVGLYTMKQSYLNNNRMATVKEVDNAMQADINYPGVQSNSVQAIRRALFTEVKSFFKALEQWKKHPEKFTGRPKFPNYSRSTDKRIIEIYQVPKVDENGYWMIPMNVACRKKFGSIKIRMPKNVRNKKISYIEIVPKQKGRFFEVHYTYEMHVSQMKKPSTTTSKALSCDLGVDRLLSCVTNTGDAFLIDGKKLKSINQYFNKMIRNLQQKNMENGLSKRVVTNQMAALWHKRERQINGYISQTVGLLFKKVKACNIDTIVVGYNTGWKQKSDMGKRNNQTFVQIPFHKLIAAIENKCVKEGIRFLKQEESYTSKASFLDKDKVPVWSKDDRTQYRFSGKRITRGLYQSKAGTCIHADINGALNTLQKSRVVELDENLKVKTPILLEVQKRKAVASRIA

SEQ ID NO: 5726 - protein, 451 aa, unidentified
MSRKKAVKVLRKQKKRETMRRFTQKQNIGRACLTAKEFRLLQRMSHSSKALRNVGLYTMKQSYLNNKKMATVKEVDTAMQADMNYWGMQSNSVQAIRRALLTEVKSFFKTLEQWKKKPETFTGRPKFPNYSRSTDKRIIEIYQVPKVDDNGYWMIPMNVAFRKKFGSIKIRMPKNLRNKKISYIEIVPKQKGRFFEVHYTYEMHVSQMKQPSTTTSNALSCDLGVDRLVSCVTNTGDAFLIDGKKLKSINQYFNKMIRNLQQKNMENGLSKRVVTNKMAALWHKRERQINGYISQTVGLLFKKVKACNIDTVVVGYNAGWKQKSHMGKKNNQKFVQIPFHKLIAAIENKCVKEGIRFLKQEESYTSKASFLDKDPVPTWSKDDGTQYRFSGKRITRGLYQSKSGTCIHADINGALNTLEKSRVVELDDNLKVKTPILLEVQKRKAVASRIA

SEQ ID NO: 5727 - protein, 451 aa, unidentified
MARKKAVKILRKQKKRETMQRFTQKQHIGRACLTAKEFRLLQRMSHSSKALRNVGLYTMKQSYLNNNRMATVKEVDTAMQADINYWGVQSNSVQAIRRALFTEVKSFFKALEQWKKNPEKFTGRPKFPNYSRSTDKRIIEIYQVPKVDENGYWMIPMNVAFRKKFGSIRIRMPKNLRNKKISYIEIVPKQKGRFFEVHYTYDMHVSQMKKPSTTTSNALSCDLGVDRLLSCVTNTGDAFLIDGKKLKSINQYFNKMIRNLQQKNMENGLSKRVVTNQMAALWHKRERQINGYISQTVGLLFKKVKACNIDTIVVGYNAGWKQKSDMGKKNNQKFVQIPFHKLVAAIENKCVKEGIRFLKQEESYTSKASFLDKDPVPVWSKDDRTHYRFSGKRITRGLYQSKAGTCIHADINGALNTLEKSKVVELNDNLKVKTPILLEVQKRKAVAARIA

SEQ ID NO: 5728 - protein, 419 aa, unidentified
MGVQQNRISTDKDTRAILEYLCTESNKLNNCAVYYARQIYLKTHKFVTGFDLVKAVGKNRHFSALPSEVAVQTCLSVGESVKSFSELIKKSKKGELNLKPKFPNYRKPGLNLIAFPRRSLKLINNQIRFALGLQIKAWFGIKEFFLPMPTNLCFDVIKEVRILPRNRELYIEFVYEVSISTSVLEQSKVLGIDHGINNWLTCVSNIGTSFIVDGLHLKSLNQWYNKSIAKIKENKPQGFWSNRLASITEKRNRQMRHAVNQAAIIVINHCIDHQIGSIVFGWNQGQKDSADLGKKNNQKFVQIPTAKLKNRIEQLCEQYGIEFIETEESYTSKTSFLDNDVLPTIGAKPDGWRSSGVRTNRGLFKSATGIKINADCNGAANILRKVAMIAKFDLAGISRGCLSQPKKVLLWTLQKSQCL

SEQ ID NO: 5729 - protein, 406 aa, unidentified
MTHLSRSLYNLTLYTVKQHYELNGTFLPYVKAYHLVKDSEPYKLLPSQAAQQTMKIVERNFRSFFHVLNERRKGNYNRPVRPPKYLPKDGHFLLIFPYQSFRVKGDRIILSLGRNFAEKYGVKHLEFTLPKNVKGHRIKEVRIVPRYNALWFEIEYVYEVEPERRDLDHSKYLAIDLGLDNFATCVSTTGTAFIIEGRGLKSFNRWWNREKARLQSQYDKQGVKFGKKMAWLLRKRNNVINDFMNKAVSYIVNYCLENGIGNIVIGELKGIKQNANLGKRNNQNFQYVPFGLFKQKLKAKCERYGINYSEVDEAYTSRVDALALEPIGKKKEYLGRRVKRGLFQSSTGTLVNADVNGALNILRKVAGDSPLRGIAGSGRVNRPVRVRLPWGGLTPHEAPPVRGVVH

SEQ ID NO: 5730 - protein, 413 aa, unidentified
MYLTQKNQIRGLKANEFTALKELCRLSKNLYNVGLYTVRQYYFQERKHLKYESNYHHCKGNENYRMLNTDIAQQTLKVVDRTFRSFYGLITSVKSGSYSQKIRLPHYLPKEGYFPLIMPRVKVKDGKFRIPMSTAFKTQSGEIWIPFPDRLNQETLKEVRILPKYNGRFFEVEFISEAEETPIETKSESAISIDLGLDNLATCIDTNGASFILDGKPLKSFNQWFNKENARLQSIKDLQKIKGTTERQAKLAINRNAKVRDYLNKAARYVINHCIEHRIGKLVVGFNLEIKQSINIGSRNNQNFVQIPHSSFRFKLKALCERYGIKYVEQEESYTSKASFLDDDNIPVFNADNPKKYEFSGKRINRGLYRTQFGILVNADCNGAANILRKSKHNALSGVSSGCLAQPLRVKIS

SEQ ID NO: 5731 - protein, 458 aa, unidentified
MYKTQQIRLTDAIDNETYSFLVLLCEQASKLSNQVVYSIRQKHFEACERVEFFDKDGFYRSGFKTKKVSVDSYASLCKEFASSEHYQIMGGQQAQQTIRSVIESFRSYNELLPLFFSGELKGFPRIPGYRKDGLTVVTFPAQAVKPDIETGMCRLAISRELSKDILNDVWIPGGYGFKSHQLVEVRILPRNRELYALYVYKSGNEAVSCLLGLDHSQALGIDPGTNNWLTCVSTLGKSFIIDGRQLKSLNTNYNRKVKKIKTGKPQGFWNDELADLTELRNRQMRDAINKTARFIVNYCLNHKIGNVVFGWGQGVKDKITLGKRNNQNFVQIPTSKLKERILTLCEGIGIQFTETEESYTSKTSFLDGDFLPKLGEKPESWKPSGKRVKRGMYKTKNNLVINADCNGACNILVKVKTQLGLCLAKVIREVLTVPKRYNVFGSLKKIYRKRCYARFYLA

SEQ ID NO: 5732 - protein, 470 aa, unidentified
MYKTQQIRLTDAINNETYNFLILLCEQASKLSNQVVYSIRQKHFETCERVEFFDKDEFYRSGFKTKKISVDSYASLCKEFTSSEHYQIMGGQQAQQTIKSVIESFRSYNELLPLFFSGELKGFPRIPGYRKDGLSVVTFPAQAVKLDIETGMCRLAISRELSKDILNDVWIPGGYGFKPHQLVEVRILPRNRELYAEYVYKSGNEAVSCLLGLDHSQALGIDPGTNNWLTCVSTLGKSFIIDGRQLKSLNTNYNRKVKKIKTGKPQGFWNDELADLTELRNRQMRDAINKTARFIVNYCLNHKIGNVVFGWGQGVKDKITLGKRNNQNFVQIPTSKLKERILTLCEEIGIQFTETEESYTSKTSFLDGDFLPKFNGEKPEQWKPSGRRVKRGMYKTKNNLVVNADCNGAANILVKVKTQLGLCLAKVIREVLTLPKRYDVFSSLKKIYRKRSEVRILSALRYISLESSWL

SEQ ID NO: 5733 - protein, 451 aa, unidentified
MARKRAVKVLRKQKKRETMQRFTQKQNIGRACLTAKEFRLLQRMAHSSKALRNVGLYTIKQSYLNDNKMATVKEVDTAMQADMNYSGVQSNSVQAIRRALFTEMKSFCKALEQWKKHPEKFTGRPKFPNYSRSTDKRIIEIYQVPKVDEKGYWIIPMNVAFRKKFGSIKIRMPKNLRNKNISYIEIVPKQKGRFFEVHYTYEMHISQMKKQPTTTSNALSCDVGVDRLVSCVTNTGDAFLIDGKKLKSINQYFNKMIGNLQQKNVENGLSKRIVTNKIAALWHKRERQIHGYIAQTVGLLFKKVKEFDIDTIVVGYNAGWKQKSDMGKKNNQTFVQIPFHKLIAAIENKCVKEGIRFFKQEESYTSKASFLDKDPVPVWSRDDKTYYLFSGKRITRGLYQSKAGTCIHSDINGALNTLQKSRVVELDENLKVKTPILLEVQKRKAVATRIA

SEQ ID NO: 5734 - protein, 451 aa, unidentified
MARKKAVKVLRKQKKRENMQRFTQKQNIGRACLTAKEFRLLQRMSHSSKALRNVGLYTMKQSYLNHNRMATVKEVDTAMQNDMNYPGVQSNSVQAIRRSLFTEVKSFFKALEQWKKNPEKFTGRPKFPNYSRSTDKRIIEIYQVPKVDENGYWIIPMNVAFRKKFGSIQIRMPKNLRNKNISYIEIVPKQKGRFFEVHYTYEMHVSQMKKQPTTTSNALSCDLGVDRLLSCVTNTGDTFLIDGKKLKSINQYFNKMICNLQQKNMDNGISKRIVTNKMAALWHKRERQINGYIAQTVGLLFKKVKEFDIDTIIVGYNAGWKQNSHMGKKNNQKFVQIPFQKLIAAIENKCVKEGIRFFKQEESYTSKASFLDKDPVPVWSKDDRTQYRFSGKRITRGLYQSKAGTCIHADINGALNTLKKSGVVELDDNLKVKTPILLEVQKRKAIASRIA

SEQ ID NO: 5735 - protein, 451 aa, unidentified
MAKKKAVKVLRKQKKRETLRRFTQKQNIGRACLTAQEFRLLQRMSHSSKALRNVGLYTMKQSYLKHNKMATVKEVDTAMQADMNYWGIQSNSVQAIRRALFTEVKSFFKALEQWKKNPEKFTGRPKFPNYSHSTDKRIIEIYQVPKVDENGFWMIPMSVAFRKKFGSIKIRMPKNLRNKNISYIEIVPKQKGRFFEVHYTYEMHVSQMKQQSMTTSNALSCDLGVDRLVSCVTNTGDAFLIDGKKLKSINQYFNKMICNLQQKNMDNGISKRIVTNRMAALWHKRERQINGYISQTVGLLFKKVKEFDIDTIVVGYNAGWKQNSHMGKKNNQKFVQIPFHKLIAAIENKCIKEGIRFFKQEESYTSKASFLDKDPVPVWSKDNRAQYYFSGKRITRGLYQSKAGTCIHADINGALNTLQKSQVVELDGNLKVKTPILLEVQKRKAVTLRIA

SEQ ID NO: 5736 - protein, 451 aa, unidentified
MARKKAVKVLRKQKKRETMQRFTQKQNIGRACLTAKEFRLLQRMSHSSKALRNVGLYTIKKSYLNHNKMATVKEVDTAMQADLNYSGIQSNSVQAIRRALFTEVKSFFKALEQWKKKPETFTGRPKFPNYSGSTDKRIIEIYQVPKVDDNGYWLIPMNVAFRKKFGSIKIRMPKNLRNKKISYIEIVPKQKGRFFEVHYTYEMHVSQMKKQSTTTSNALSCDLGVDRLLSCVTNTGDAFLIDGKKLKSINQYFNKMIRNLQLKNVENGLSKRVVTNKMAALWHKRERQINGYISQTVGLLFKKVKACNIDTVVVGYNTGWKQKSDMGKKNNQKFVQIPFHKLIAAIENKCVKEGIRFLKQEESYTSKASFLDKDRVPVWSKDDRTHYRFSGKRITRGLYQSKAGTCIHADINGALNTLEKSRVVELDENLKVKTPILLEVQKRKAVASCIA

SEQ ID NO: 5737 - protein, 451 aa, unidentified
MVRKKAVKVLRKQKKRETMQRFTQKQNIGRACLTAKEFRLLQRMSHSSKALRNVGLYTIKQSYLNHNKMATVKEVDTAMQTDMNYWGIQSNSVQAIRRALFTEVKSFFKALEQWKKKPETFTGRPKFPNYSRSTDKRIIEIYQVPKVDDNGYWMIPMNVAFRKKFGSIKIRMPKNVRNKKISYIEIVPKQKGRFFEVHYTYEMHVSQMKKPSTTTSNALSCDLGVDRLVSCATNTGDTFLIDGKKLKSINQYFNKMIRNLQLKNMENGLSKRVVTNQMAALWHKRERQINGYISQTVGLLFKKVKACNIDTVVVGYNAGWKQKSDMGKKNNQKFVQIPFHKLIAAIENKCIKEGIRFLKQEESYTSKASFLDKDKVSVWSKEDRTHYHFSGKRITRGLYQSKAGTCIHADINGALNTLQKSKVVELDENLKVKTPILLEVQTRKAVASRIA

SEQ ID NO: 5738 - protein, 451 aa, unidentified
MARKKAVKVLRKQKKRETMQRFTQKQNIGRACLTAKEFRLLQRMSHSSKALRNVGLYTIKQSDLNNNKMATVKEVDTAMQADMNYWGIQSNSVQAIRRALFTEVKSFFKAWEQWKKKPETFTGRPKFPNYSRSTDKRIIEIYQVPKVDDNGYWMIPMNVAFRKKFGSIKIRMPKNLRNKKISYIEIVPKQKGRFFEVHYTYEMHISQMKKQSTTTSNALSCDLGVDRLLSCVTNTGDAFLIDGKKLKSINQYFNKMIRNLQLKNVENGLSKRVVTNKMAALWHKRERQINGYISQTVGLLFKKVKACNIDTVVVGYNAGWKQKSDMGKKNNQKFVQIPFHKLIAAIENKCVKEGIRFLKQEESYTSKASFLDKDPIPVWSKDDRTHYRFSGKRITRGLYQSKAGTCIHADINGALNTLQKSRVVQLDDNLKVKTPILLEVQKRKAVASCIA

SEQ ID NO: 5739 - protein, 451 aa, unidentified
MARKKAVKVLRKQKKRETMQRFTQKQNIGRAYLTAKEFRLLQHMSHSSKALRNVGLYTIKQSYLNNNKMATVKEVDTAMQADMNYWGIQSNSVQAIRRALFTEVKSFFKAWEQWKKKPETFTGRPKFPNYSRSTDKRIIEIYQVPKVDDNGYWMIPMNVAFRKKFGSIKIRMPKNVRNKKISYIEIVPKQKGRFFEVHYTYEMHVSQMKKQSTTTSNALSCDLGVDRLLSCVTNIGDAFLIDGKKLKSINQYFNKMICNLQQKNMENGLSKRVVTNKIAALWHKRERQINGYISQTVGLLFKKVKACDIDTVVVGYNAGWKQKSDMGKKNNQTFVQIPFHKLIAAIENKCIKEGIRFLKQEESYTSKASFLDKDPIPVWSEDDRTHYRFSGKRITRGMYQSKSGKCIHADINGALNTLQKSRVVELDENLKVKTPILLEVQKRKAIALCIA

SEQ ID NO: 5740 - protein, 451 aa, unidentified
MARKKAVKVLRKQKKRDTMQRFTQKQNIGRACLTAKEFRLLQRMSHSSKALRNVGLYTIKQSYLNHNKIATVKEVDTAMQADMNYSGIQSNSVQAIRRTLFTEVKSFFKSLEQWKKNPEKFTGRPKFPNYSRSTDKRIIEIYQVPKVDDNGYWMIPMNVAFRKKFGSIKIRMPKNLRHKKISYIEIVPKQKGRFFEVHYTYDMHVSQMKQQSTTTSNALSCDLGVDRLVSCVTNTGDAFLIDGKKLKSINQYFNKLIRNLQQKNVENGISKRVVTNRMAALWHKRERQINGYISQTIGLLFKKVKAFGIDTIVVGYNAGWKQKSDMGKKNNQTFVQIPFHKLIAAIENKCVKEGIRFLKQEESYTSKASFLDKDRVPVWSKDDKTHYCFNGKRITRGLYQSKAGTCIHADINGALNTLQKSRVVELDDNIKVKTPILLEVQKRKAVASRIA

SEQ ID NO: 5741 - protein, 474 aa, unidentified
MFRFVPNIDLSKVMNSLRKVVKAMARKKAVKVLRKQKKRETIQRFTQKQNIGRACLTAKEFRLLQRMSHSSKALRNVGLYTIKQSYLNHNKMATVKEVDTAMQADMNYSGVQSNSVQAIRRALFTEVKSFFKAWEQWKKKPETFTGRPKFPNYSNPTDKRIIEIYQVPKVDDNGYWMIPMNVAFRKKFGSIKIRMPKNVRNKKISYIEIVPKQKGRFFEVHYTYEMHVSQMKKQSTTTSNALSCDLGVDRLLSCATNTGDTFLIDGKKLKSINQYFNKMIRNLQLKNIENGLSKRVVTNQMAALWHKRERQINGYISQTVGLLFKKVKACSIDTVVVGYNAGWKQKSDMGKKNNQKFVQIPFHKLIAAIENKCVKEGIRFLKQEESYTSKASFLDKDPIPVWSKEDRTHYLFSGKRITRGLYQSKAGTCIHADSNGALNTLQKSRVVELDENLKVKTPILLEVQKRKAVASRIA

SEQ ID NO: 5742 - protein, 502 aa, unidentified
MIIIRPLEPKGITVEEWNYDEEHVHILFRFVPNIDLSKIILMNSLRKVVKTMVKKKAVKVLRKQKKRENMQRFTQKQNIGRACLTAKEFRLLQRMSHSSKALRNVGLYTIKQSYLNHNKMATVKEVDTAMQTDMNYWGIQSNSVQAIRRALFTEVKSFFKALEQWKKKPETFTGRPKFPNYSDSTDKRIIEIYQVPKVDDNGYWMIPMNVAFRKKFGSIKIRMPKNVRNKKISYIEIVPKQKGRFFEVHYTYEMHVSQMKKQSTTTSNALSCDLGVDRLVSCVTNTGDAFLIDGKKLKSINQYFNKMIGNLKQKNVENGLSKRVVTNKMAALWHKRERQINGYISQTVGLLFKKVKACNIDTVVVGYNAGWKQKSDMGKRNNQTFVQIPFHKLLAAIENKCVKEGIRFLKQEESYTSKASFLDKDPIPVWSKDDRTYYRFSGKRITRGLYRSKTGTCIHADINGALNTLQKSRVVELDDNLKVKTPILLEVQKRKAVASRIA

SEQ ID NO: 5743 - protein, 451 aa, unidentified
MARKKAVKVLRKQKKRENIQRFTQKQNIGRACLTAKEFRLLQRMSHSSKALRNVGLYTIKQSYLNNNKMATVKEVDTAMQADMNYWGIQSNSVQAIRRSLFTEVKSFFKGLEQWKKKPETFAGRPKFPNYSGSTDKRIIEIYQVPKVDDNGYWMIPMNVAFRKKFGSIKIRMPKNVRNKKISYIEIVPKQKGRFFEVHYTYEMHVSQMKKPSTTTSNALSCDLGVDRLLSCVTNTGDAFLIDGKKLKSINQYFNKMIRNLQLKNVENGLSKRVVTNKMAALWHKRERQINGYISQTVGLLFKKVKACNIDMVVVGYNTGWKQKSDMGKKNNQKFVQIPFHKLIAAIENKCIKEGIRFLKQEESYTSKASFLDKDRVPVWDKDDRTHYRFSGKRITRGLYQSKAGKCIHADINGALNTLEKSRVVELDDNLKVKTPILLEVQKRKAVASCIA

SEQ ID NO: 5744 - protein, 451 aa, unidentified
MARKKAVKVLRKQKKRENMQRFTQKQNIGRACLTAKEFRLLQRMSHSSKALRNVGLYTIKQSYLNHNKMATVKEVDTAMQTDRNYWGIQSNSVQAIRRALFTEVKSFFKALEQWKKKPDTFTGRPKFPNYSRSTDKRIIEIYQVPKVDDNGYWIIPMNVAFRKRFGSIKIRMPKNLINKQISYIEIVPKQKGRFFEVHYTYEMHVSQMKKQSTTTSNALSCDLGVDRLLSCVTNTGDAFLIDGKKLKSINQYFNKMIGNLKQKNVENGLSKRVVTNKMAALWHKRERQINGYISQTVGLLFKKVKACNIDTVVVGYNTGWKQKSDMGKKNNQKFVQIPFHKLIAAIENKCVKEGIRFLKQEESYTSKASFLDKDRVPVWSKDDRTHYRFSGKRITRGLYQSKAGTCIHADINGALNTLEKSRVVELDENLKVKTPILLEVQKRKAVASCIA

SEQ ID NO: 5745 - protein, 451 aa, unidentified
MAKKKAVKVLRKQKKRETIQRFTQKQNIGRACLTAKEFRLLQRMSHSSKALRNVGLYTIKQSYLNHNKMATVKEVDTAMQIDMNYWGIQSNSVQAIRRALFTEIKSFFKALEQWKKKPETFTGRPKFPNYSRPTDKRIIEIYQVPKVDDNGYWMIPMNVAFRKKFGSIKIRMPKNLRNKKISYIEIVPKQKGRFFEVHYTYEMHVSQMKKQSTTTSNALSCDLGVDRLLSCVTNTGDAFLIDGKKLKSINQYFNKMIRNLQLKNVENGLSKRVVTNKMAVLWHKRERQINGYISQTVGLLFKKVKACNIDTVVVGYNAGWKQKSDMGKKNNQKFVQIPFHKLIAAIENKCVKAGIRFLKQEESYTSKASFLDKDPIPVWSKEDRTHYLFSGKRITRGLYQSKAGTCIHADINGALNTLQKSRVVELDDNLKVKTPILLEVQKRKAVASRIA

SEQ ID NO: 5746 - protein, 392 aa, unidentified
MYLVERHIIKNNKELDEVCFNSKNLYNRALYLVRQHYFETKEYLDWIKINKLMVDSKDSDYYSLPCKVSNQILRLLDRNFKAFFALLKKKQSGKYNKSVRLPKYLDKEGRYITIFPKDAVSKVYIRKGIIKLSSLSIEIPTKVTESNLVEVRVLPRNNHHVVEVVYKVDDVKPKSDNGRYASIDLGLDNLAMVSSNVVKPFSINGRPLKSINQYYNKEQARLQSHLKGNKKTSKRINSITNKRNNKVKDYLHKSSRKIVNFLVSNNISTLVIGYNEEWKQNINLGRTNNQSFVNIPFYTFIKQLEYKCKLEGINVILTEESYTSKCSFLDGETIEEHENYLGKRIKRGLFKSAKGKLINADLNGSLNILRKVIGDFSYPIEVCSTPLRVTPK

SEQ ID NO: 5747 - protein, 398 aa, unidentified
MYLVERHIIKSNNPLRKELDNVCFLSKNLYNKALYLVRQHFFSTKEYLDYYKLNRLLVDSRDVDYYSLNTKVSKGTLLLLDRNFKSFFSLIKKKKSNSYEKSISIPKYLDKEGRYIAIFEKNAVSKRFLKKGVIKLANISNVVKTKVKLDALKEVRVLPRNNHHIVEVVYKKEEKPLLANNERYAAIDLGLNNLATVSSNVEKPFIINGRPLKSINQRWNKHKANLQSCLTSNKKSSKQIILITNKRNNRVKDYLHKSSRKIVNFLVSKNISTLVLGYNEEWKQNISIGKANNQSFVSIPFYTFIQQLQYKCKLEGINVVLTEESYTSKCSFLDDEFIEKHDSCLGKRVKRGLYKTTKGRLINADLNGSLNILKKVIGEFQYPIGACCTPVRITPSFN

SEQ ID NO: 5748 - protein, 413 aa, unidentified
MKLSFKFKPNISNKQLEIIEELSYHTTKLYNIINYDLRENGVKTYYNIEKDYKSNWHCDFLHSHTRQQMFKVLEQNWKSYFASVEDFGANPSKYKAKPRPPKFKNVDKNKNEIIFTNLAIRFDNGLLKLSLSKAIKSLFNVGSLNFEVSKKLQGIINWNSLQQARLNYDKVQKCWYLIVIYNKEELENNKINICSIDLGLDNIATLTFKDGLNQYIFCGKKLKSVNSYTNKQIAHLQSIEMFKCGSGKFKNTKRINKIRRYRNNYINDYMHKVSKSIIDKAIENNVGKIVIGKLKGIKQNMDFNKTFVQIPIQRLTELISYKAKLQGIEVKFQEESYTSGCSALDLEFITKKNYDKSRRIVRGLFLSSYGLINSDINGSLNILRKSEKCIPDLIKLVRDNGKLDSPKRIRIAC

SEQ ID NO: 5749 - protein, 392 aa, unidentified
MYLTERHIIKNNKELDEVCLKSKNLYNKAMYLVRQHYFNTKEYLNFFKVNKLMIDSKDEDYYSLPTNVSNQTLRLLDKNFKLFFSLLKKKKKGNYDKPVKLPKYLDKEGRHITIFNKYSVSKKSLKKGFIKLSSLSIEVPTKVKESELVEVRILPRNNHHIFEVVYEVEDKEVKVDNNRYASVDLGVNNLMTVSSNVTKPFIINGRPLKSINQYWNKEKARLQSLLKGNKRTSKRIQSITNKRNNKVLDYLHKSTRKLVNFLVSNNISTLIVGYNEEWKRNINLGKRNNQSFVNIPFYTLIKQLEYKCKLEGINFIITEESYTSKCSFLDNEEVCKHKKYLGKRIKRGLFKSSENKLINADLNGSLNILKKVVGEFEYPIEAWSTPLKITLK

SEQ ID NO: 5750 - protein, 391 aa, unidentified
MYLTERHIIKNNKELDEICFNSKNLYNKALYLVRQHYFNNKKHLDYVKVNRLLVDSKDVDYYALPTKVSVQILRLLDRNFSSFFSLIKKKKNNNYDKFVRIPKYLDKEGRTIAIFPKDAISKRFIRKGLIKLSSLNILIPTKVTKSNLVEVRVLPRNNHHIVEIAYKVEEKQLSPNNDRYVSVDLGLNNLATVSSNIEKPFIINGRPLKSINQYWNKEKARLQSFLRDNRKTSKRIERMTNKRNNKVKDYLHKSSRKIVNFLVSKKISTLVVGYNEEWKQNINIGKKNNQSFVSVPFYTFIQQLEYKCKLEGINFILTEESYTSKCSFLDNEPLGKKDTYLGKRVKRGLYKTAKGKLINADLNGSLNILKKVVGELQYPIEVCSTPVRITL

SEQ ID NO: 5751 - protein, 396 aa, unidentified
MYLVERHIIKPNNSLYKELDNVCFLSKNLYNKALYLVRQHYFSTKEYLDFYKLCKLLVDSKDTDYYALNTKVSKGTLLLLDRNFKSFFSLIKKKKNKDYNKPTRIPKYLDKEGRYTAVFEKHAVSKRFLDRGLIKLANISNVIKTKVKLEDLKEVRVLHRSNHYILEVVYKKEEKPLIEDNGRYAAVDLGLNNLATVCSNVEKPFIINGRPLKSINQRWNKHKANLQSRLTNNIKSSKQLALITNKRNNRVKDYLHKSSRKIVNFLVSKNISTLVIGYNEEWKQNISIGKVNNQSFTSIPFYTFINQLEYKCKLEGINVILTEKSYTSKCSFLDNEPLEKQDSYLGKRIKRGLFRSAKNKLINADLNGALNILKKVIGEFQYPIGACCTPVRIILV

SEQ ID NO: 5752 - protein, 393 aa, unidentified
MHLTERHIIKNNEELDKLCFNSKNLYNKALYLVRQHYFKTKNYLNFFGVNRLMIESKDEDYYALPTRVSNQTLRLLDKNFKSFFALLKKKQNGKYNKPVRLPKYLNKEGRYIAVFHKSSISKAYFRKGIIKLSSLSIEIPTKKANESNLVEVRVLPRNNHHVVEVVYKVEQKEPKSDNGRYASIDLGLNNLATVSSNVVEPFIINGRPLKSINQYYSKEKARLQSHLKGNKKTSKRIKSITNIRNNKVKDYLHKSSRKIVNFLVSNKISTLIIGYNEEWKQNINLGRTNNQSFTNIPFYTFINQLDYKCKLEGINVILTEESYTSKCSFLDNETIEEHENYLGKRIKRGLFRSAEGKLINADLNGSLNILRKVVGDFSYPIEVCSTPLRVTLK

SEQ ID NO: 5753 - protein, 392 aa, unidentified
MYLTERHIIKNNEELDILCFKSKNLYNKALYLVRQHYFETKNYLDWIKVYRLMVDSKDEDYYALPTKVSNQTLRLLDRNFSSFFALIKKKKSSNYDKPIRIPRYLDKEGRYIAVFYKEAVSKVYLRKGIIKLSSLSIEIPTKKANESNLVEVRILPRNNHHIIEVVYEIEDKEVKSDNRRYASIDLGLNNLATVGSNVVKPFIINGKPLKSINQYWNKEKARLQSLLKGNKKTSKRINSITNKRNNKVKDYLHKSSKMLVNFLVSNDISTLVIGYNEEWKQNINIGKRNNQSFVNIPFYTFIKQLEYKCKLEGINIILTEESYTSKCSFLDNESVEKHESYLGKRIKRGLFRSAKNKIINADLNGSLNILKKAVGEFQYPIEVCSTPLRMNI

SEQ ID NO: 5754 - protein, 394 aa, unidentified
MMYLIERHVIENNKELDELCFKSKNLYNRALYLVKQHYFETESYLNFFGVNKLMVDSKDVDYYALPTKVSKQTLMSLDRNFKAFFSLLKKKQSGGYDKNVRIPRYLDKEGRYVTIFPKDAIFKKPLRKGIIKLSSLSIEIPTKKANESNIVEVRVLPRNNHHVVEVVYKVDEVKSKSDNGRYASIDLGLDNLATVSSNVDKPFIINGRPLKSINQYWNKEKARLQAHLKGNKRTSKRIKNITNIRNNKVIDYLHKSSRKIVNFLVSNNISTLIIGYNEEWKQNINLGRTNNQAFVNIPFLTFINQLDYKCKLEGINVILIEESYTSKCSFLDNEPIEKHENYLGKRIKRGLFKSAKGKLINADLNGSLNILKKVVGEFEYPIEVCSTPLRVTLK

SEQ ID NO: 5755 - protein, 393 aa, unidentified
MIKPSNRLLYKACDELCFLSKNLYNAVLYIQRQNYQECKSYITDRNMRKVLRSQKNPDYYALPSSPADYVVKQLDEAYKSAFKLLKLKNKGEYKGKIKFPKYKDKVNGRNVTTFYKDRLRKRTYGKTGLIHLSKTNIKFKSNIPFEQIQEVKVIPKNGYYEFQVIYIVKEEKQLESNNCAAIDLGLNNLATIVTNISSPIIINGKPLKSINHHWNKRKAKLQSKLPKGVRTSKQIKQITNKRNRRINNYLHQTSRALVNELRKLSISKVVIGSNKGWKENISLGKRNNQNFVQTPYNRFIEMLTYKCKLVGIEVITAEESYTSKCSFLDNETIEKHDTYVGKRIKRGLFKSSKGILINADVNGAYNIMKKHLGITVEQLDSVQVFSIPKVLKF

SEQ ID NO: 5756 - protein, 394 aa, unidentified
MMYLIERHVIKSNKELDELCFKSKNLYNRALYLVKQHYFETESYLNFFGVNKLMVDSKDVDYYALPTKVSKQTLMSLDRNFKAFFSLLKKKQSGNYDKSIRIPKYLDKEGRYITVFPKDAIFKKPLRKGIIKLSSLSIEIPTKKANESNIVEVRVLPRNNHHVVEVVYKVEQKEPKSDNGRYASIDLGLDNLATVSSNVDKPFIINGRPLKSINQYYNKEKARLQAHLKGNKRTSKRIYSITNIRNNKVIDYLHKSSRKIVNFLVSNNISTLIIGYNEEWKQNINLGRTNNQAFTNIPFYTFINQLDYKCKLEGINVILTEESYTSKCSFLDNETIEEHENYLGKRIKRGLFKSAKGKLINADLNGSLNILKKVVGEFEYPIEVCSTPLRVTLK

SEQ ID NO: 5757 - protein, 394 aa, unidentified
MMYLTERHIVKNNKELDKLCFNSKNLYNKALYLVRQHYFKTKGYLNFFGIRKLMIDSKDEDYYALPTKVSNQTLMLLDKNFKSFFARLKKKQSGNYDKPIGIPRYLNKQGRYIAIFNKEAVSKVYLRKGIIKLSKSSIEIPTKKANESNLVEVRVLPRNNHHVIEVVYKVDGVKPKDDNGRYAAIDLGLNNLATVSSNVVKPFIINGRPLKSINQYYNKEKARLQAHLKGNQRTTKRIKSITNIRNNKVKDYLHKSSRRIVNFLVSNNISTLIIGYNEEWKQNINLGRTNNQSFVNIPFLTFINQLEYKCKLEGINVILTEESYTSKCSFLDGETLEEHENYLGKRIERGLFKSAKGKLINADLNGSLNILRKVVGDFSYPIEVCSTPLRVTLK

SEQ ID NO: 5758 - protein, 392 aa, unidentified
MYLVERHIVKSNEDLDKLCFNSKNLYNKALYIIRQHYFNTKEYLDYVKINRLLVDSKDVDYYALPIKVSVQTLRLLDRNFKSFFSLIKKRKSKDYNKPVRVPRYLDKDGRTIAVFPKDAISRIFIRKGLIKLSTLNILIPTKVTESNLVEVRVLPRNNHHIVEVVYEKEEKPLLENNGRYAAIDLGLNNLATVCSNVEKPFIINGRPLKSINQRWNKHKANLQSRLANKSSKQLALITEKRNNRVKDYLHKSSRKIVNFLVSNKISTLVIGYNGEWKQNINIGRVNNQSFVTIPFLTFVQQLEYKCKLEGINVILTEESYTSKCSFLDNEPLGKHDNYKGKRISRGLFKTSTNKLINADLNGSLNILRKVFGEFQYPIGVSSAPVRITPSFN

SEQ ID NO: 5759 - protein, 396 aa, unidentified
MILAERHIIKVGTAEFKEYDTACFLSKNMYNSALYALRKHFFEAKTLKHKFQLSKEFQEQNQPDYRAMFVRSAQQIIGVAHQSMKSFFALIKAKKSGSYDKPVKLPKYLPKNGRQVMIYDNKAFYEKDFKEGYIRVAQTQSRIPTKIKNIKSIQQIRLVPKGNHVVLEVLYKVTDTPLKQDNKRYASIDLGLNNLATVGSNVVKPFIINGKPLKSINQYYNKEKARLQSLLKGNKKTSKRIKSITNKRNNKVKDYLHKSSRMLVNFLVSNNISTLVIGYNEEWKQNINIGKKNNQTFVNIPFYTFIQQLEYKCKLEGINIILTEESYTSKCSFLDNETIEKHENYLGKRIKRGLFKSSKGKLINADLNGSLNILKKVVGEFQYPIEVCSTPLRVTV

SEQ ID NO: 5760 - protein, 375 aa, unidentified
MMYLVERHIIKNNKELDELCFKSKNLYNKALYLVRQHYFKTKSYLNFFGVNKLMIDSKDEDYYALPTGVSNQTLRLLDKNFKSFFTLIKKKRSGNYDKLIRIPRYLDKEGRYITTFIKQNVSKKSLKKGLIKLSSLSIEIPTKVTESNLVEVRVLPRNNHHVIEVVYKVEQKEPKSDNGRYASIDLGLDNLATVSSNVVKPFIINGRPLKSINQYYNKEKARLQAHLKGNKKTSKRIKSITNKRNNKVKDYLHKSSRKIVNFLVSNNIGTLIIGYNEEWKQNINLGRTNNQAFVNIPFYTFIKQLEYKCKLEGINVILTEESYTSKCSFLDGESLEEHENYLGKRIKRGLFKSAKGKLINADLNGSLNILRKVVG

SEQ ID NO: 5761 - protein, 395 aa, unidentified
MYLTEKHIIKRTHPFYNECDCLCFQSKNIYNQGLYNVRQHYFNTKTYLNYYGNYDLTKTQECYDYLPKKVFTQTLKHVDMVFKSFFALLKNKTVKNKIPKYLDKVNGRYVATFTKQAIGLREFKKTGKLRLSQTDIYIATKLTDFNQLKEVRVVPRMHHYVIEVVYQVKEKTHCDNGKYASIDLGLNNLATVAFNEGSKPLIVNGRPLKSINQYYNKKKAQYQSRLKGGKRTSKRICTLTNKRNNKVTDYLHKASRLLVNQLVSQGITTLVIGKNKNMKQDINIGKVNNQNFVQLPIMRFADLMKYKCELEGIKVLFNEESYTSKCSFLDCEPICKHDKYMGKRVKRGLFVSRDGIKINADVNGAYNIMLKAIPNAFVDGIEGVGVHPMVLTIKR

SEQ ID NO: 5762 - protein, 395 aa, unidentified
MYLTEKHIIKHTHPFYNECDRLCFQSKNIYNQGLYNVRQYYFNHKKYLNYYGNYDLTKTQECYDYLPKKVFCQTLKHVDMVFKSFFALLKNKSVKNKIPKYLDKVDGRYVATFTKQAISLMEFKKTGKLRLSQTDIYIVTKLTDFSSLKEVRVVPRTHHYVIEVVYQVKEKTHYDNGKYASIDLGLNNLATVTFNDGSKPLIVNGRPLKSINQYYNKKKAHYQSRLKGCRHTSKRICTLTVKRNNKVTDYLHKASRLLVNQLVSQGITTLVIGKNKNMKQDINIGKVNNQNFVQLPIMRFADLMKYKCELEGIKVLFNEESYTSKCSFLDLEPICKHDKYMGRRIKRGLFISRHGIKINADVNGAYNIMIKAIPNAFANGIEGVGVHPMVLTIKK

SEQ ID NO: 5763 - protein, 396 aa, unidentified
MYLVERHIIKPNNSLYKELDNVCFLSKNLYNKALYLVRQHYFSTKEYLDFYKLCKLLVDSKDTDYYALNTKVSKGTLLLLDRNFKSFFSLIKKKKSKEYNKSVRIPKYLDKQGRYLAVFEKHAVSKKFLKKGLIKLANISNVIKTKVKLEDLKEVRVLHRSNHYILEVVYKKEEKPLIEDNGRYAAVDLGLNNLATVCSNVEKPFIVNGRPLKSINQRWNKHKANLQSRLTNNIKSSKQLALITNKRNNRVKDYLHKSSRKIVNFLVSKNISTLVIGYNEEWKQNISIGKKNNQSFVSIPFYTFIQQLQYKCKLEGINVVLTEESYTSKCSFLDNEPLEKKDTYLGKRVKRGLYKTAKGKLINADLNGSLNILRKVIGEFQYPIEACSTPVRITPV

SEQ ID NO: 5764 - protein, 409 aa, unidentified
MYLTERHVIKVGTVEFKEYDVICFLSKNMYNSALYALRKHFFETKTLKHKFQLSKEFQEQNQPDYRAMFVRSAQQIIGIAHQSMKSFFALIKAKKSGSYDKPVKLPKYLSKNGRQVMIYDNKAFYEKDFKEGYIRVAQTQSRIPTKIKNIKSIQQIRLVPKGNHVVLEVLYKVTDTPLKEDNRRYAAIDLGVNNLATVVSNVDSPKIINGRPLKSINQYYNKQKAKLQAKMDKEYGTSKRKQTRREQSLTFKRNNKVNDYLHKTSRKIVNYLVSNNINTLFIGKNKEWKQNINIGKRNNQNFVNIPFYKLIQMLLYKCALEGITVKEIEESYTSKCSFLDDEEISKHEEYKGKRIKRGLFKTAGGNIINADVNGGLNILRKAVGKFDYDPIEVCSTPVVWTVGFQRLTA

SEQ ID NO: 5765 - protein, 409 aa, unidentified
MELLVQEQQINQHHPYFNEIRNLCHLSKNLYNATLYEIRQHYFKTKKHLSYKDVNTKFAHENQLDYRALPAKVSKMVQRKLDKNFKSFFSLCKMYQQRTIKDMPRIPKYLNKDGYFVVEYTKQALSFKRKGYIFLSKTNIFVKCDIPRDDIQCVRLVPRDGHFVIEICYKIVYPNLKNDNGRYASIDLGINNLMTVSSNVFDPFIISGKPIKSVNQFFNKTVAEYRSLLDKFQPKQYTSKRIWRLSRWRNNKIKDYFHKKTTWLVNQLVSNNVNILVVGYNKGWKQDINIGRVNNQKFVHIPFLLLVRILEYKCRLNGITLVLQEESYTSKSSFYNADDLPKLSKNKPLFSGYRKYRGLYKLTNDNKTFNCDLNGSCNILRKYLFSIGVDVYKTMQHGYVLKSPYVIKK

SEQ ID NO: 5766 - protein, 398 aa, unidentified
MYLVERHIIKSNNPLYKELDNVCFLSKNLYNKALYLVRQHYFSTKEYLDYYKVNRKLIDSKDIDYYALPCKVSNQTLRLLDRNFKSFFSLIKKKKNKDYDKSVRIPKYLDKEGRYIAVFEKNAVSKRFLKKGLIKLANISNTFVTKVTIDNIVEVRVLPRNNHHIVEVVYKKEEKPLLVNNERYASIDLGLNNLATVSSNVEKPFIINGRPLKSINQRWNKHKANLQSRLTDNKKSSKQIALITNKRNNRVKDYLHKSSRKVVNFLVSKNISTLVVGYNEEWKQNISIGKVNNQSFVSIPFYTFIQQLQYKCKLEGINVILTEESYTSKCSFLDNEYIEKHDSYLGKRIKRGLFKTVKGRLINADLNGSLNILKKVIGEFEYPIEACCTPVRITPSLH

SEQ ID NO: 5767 - protein, 398 aa, unidentified
MYLVERHIIKPNNPLFKELDSVCFLSKNLYNKALYLVRQHYFNTKKYLGFYKMCKLLVDNKDVDYYALNTKVSKGTLLLLDRNFKSFFVLIKAKKNKDYNKSVRIPRYLDKQGRYVAVFNKEAVSIKFLKKGLIKLANISNVIKTKVKLEDLKEVRVLPRNNHHIVEVVYKKEEKSLLTNNGRYASIDLGLNNLATVSSNVEKPFIVNGKPLKSINQRWNKHKAELQSRLTNNSKSSKQIELITNKRNNRVKDYLHKSSRKIVNFLVSKNISTLVIGYNEEWKQNISIGRVNNQSFVSIPFHSFIQQLEYKCRLEGINVVLTEESYTSKCSFLDNEPLGKKDSYLGKRVKRGLFRSAKNKTINADLNGSLNILKKVFGEFQYPIEACCTPTRITPTYN

SEQ ID NO: 5768 - protein, 384 aa, unidentified
MMYLTERHIIKNNKELNEVCFKSKNLYNRALYLVRQHYFETKNYLDYCKVYRQMVDSKDKDYYSLPDRVSIQVLKLLDRNFKSFFALIKKKKDNKYNKSVRIPKYLDKQGRNIVIFPKTAVSKVYLRKGLIKLSSLNILIPTKVTESNIVEVRILPRNNHHVVEIVYKVEEKELKPDNKRYASIDLGLNNLATVSSNVVRPFIINGRPLKSINQYYNKEVARLQSFLKNNKKTSKRINNITLKRNNKIKDYLHKSSRLLVNFLVSNNISTLVIGYNEEWKQNINLGRRNNQSFVGIPFYTFIKQLEYKCKLEGINVVFTEESYTSKCSFLDNEPLRKHSNYVGKRIKRGLFKSAKGKLINADLNGSFNILRKVIGEFQYPIEVC

SEQ ID NO: 5769 - protein, 392 aa, unidentified
MYLTERHIIKNNKELDEICFKSKNLYNRALYLIRQHYFETKKYLNYYDINRIMIDSKDTDYYSLPCKVSNEILKLLDRNFKSFFALLKKKQNNKYDKPVKIPKYLDKQGKNITILPKQSISKIYLKKGLIKLSSLSIEIPTKVTESNIVEVRILPRNNHHIVEIVYKVEEKELKPDNGRYASIDLGLNNLVTIGSNVIKPFIINGKPLKSINQYWNKEVARLQSLLKGNKRTSKRINNITLKRNNKIKDYLHKSSKTIVNFLVSNNISTLVIGYNEEWKQNINIGRRNNQSFVNIPFYTFIKQLEYKCRLEGINVIFTEESYTSKCSFLDNEPLRKHSNYIGKRIKRGLFRSAKNKIINADLNGSLNILRKVIGEFQYPIEVCGTPLKISDF

SEQ ID NO: 5770 - protein, 451 aa, unidentified
MARKKAVKVLRKQKKRETMQRFTQKQNIGRACLTAKEFRLLQRMSHSSKALRNVGLYTIKQSYLNDNRVATVKEVDNAMQADMNYSGVQSNSVQAIRRALFTEVTSFFKALEQWKKHPEKFTGRPKFPNYSRSTEKRIIEIYQVPKVDENGYWIIPMNVAFRKKIGSIRIRMPKNLRNKKISYIEIVPKQKGRFFEVHYTYEMHVSQMKKQPMTTSNALGCDLGVDRLVSCMTNTGDAFLIDGKKLKSINQYFNKMICNLQQKNVENGLSKRIVTNKIAALWHKRERQIHGYIAQTVGMLFKKVKEFDIDTIVVGYNAGWKQKSHMGKKNNQTFVQIPFHKLMAAIENKCVKEGIRFLKQEESYTSKASFLDKDPVPVWAKDDKMQYHFSGKRITRGLYKSKAGICIHADINGALNTLKKSKVVELDDNLKVKTPILLEVQKRKAVASRIA

SEQ ID NO: 5771 - protein, 453 aa, unidentified
MVRKKAVKVLRKQKKRETMQRFTQKQNIGRACLTAKEFRLLQRMSHSSKALRNVGLYTIKQSYLNNNKMATIKEVDTAMQADMNYSGVQSNSVQAIRRALFTEVKSFFKALEQWKKKPETFTGRPKFPNYSRSTDKRIIEIYQVPKVDDNGYWMIPMNVAFRKKFGSIKIRMPKNVRNKKISYIEIVPKQKGRFFEVHYTYEMHVSQMKKPFTTTSNALSCDLGVDRLVSCATNTGDTFLIDGKKLKSINQYFNKMIRNLQLKNMENGLSKRVVTNQMAALWHKRERERQINGYISQTVGLLFKKVKACNIDTVVVGYNAGWKQKSDMGKKNNQKFVQIPFHKLIAAIENKCIKEGIRFLKQEESYTSKASFLDKDKVPVWSKEDRTHYHFSGKRITRGLYQSKAGTCIHADINGALNTLQKSKVVELDENLKVKTPILLEVQTRKAVASRIA

SEQ ID NO: 5772 - protein, 451 aa, unidentified
MTKKRAVKVLRKQKKRENMQRFTQKQNIGRACLTAKEFRLLQRMSHSSKALRNVGLYTIKQSYLNHNKMATVKEVDTAMQTDMNYWGIQSNSVQAIRRALFTEVKSFFKALEQWKKKPETFTGRPRFPNYSRSNDKRIIEIYQVPKVDDNGYWMIPMNVAFRKKFGSIKIRMPKNLRNKKISYIEIVPKQKGRFFEVHYTYEMHVSQMKKQSTTTSNALSCDLGVDRLLSCVTNTGDAFLIDGKKLKSINQYFNKMIRNLQQKNIENGLSKRVVTNQMAALWHKRERQINGYISQTVGLLFKKVKACNIDTVVVGYNAGWKQKSDMGKKNNQTFVQIPFHKLISAIENKCVKEGIRFLKQEESYTSKASFLDKDTIPVWSKDDRTHYRFSGKRITRGLYQSKAGKCIHADINGALNTLEKSRVVELDDNLKVKTPILLEVQKRKAVASCIA

SEQ ID NO: 5773 - protein, 431 aa, unidentified
MYGCQQVLISPDGELKGILEYVCEEARKLSDCGIYYARQIFFKTGKILSKFDLINELTRNKHYQALYSQVAQQALLNVAESFKSFKGLVREARKGNVSQRPKLPNYRKSGLILISYPKQAIKLKDGMLRFPLGQLVKAWFKIDSFFLPMPTNLKFSDIKEVRILPRNMCFYAEFVYEQPDVTIELNKSNVLGIDHGVNNWLTCVSNVGTSFIVDGLHLKSMNQWYNKQVSKLKEGKPQGFWSEQLALITEKRNRQMRDAVNKAARIVINHCIQNNIGTIVFGWNKDQKQNANMGAKQNQKFVQIPTGRLKDRITQLCEQYGIQFVETEESYTSKASFLDNDVLPTFGEKPEGWQASGKRIVRGLYKSAQGFLVNADAQGAANIIRKVAAKLGLVLSRVSRVLLNAPVRIRLWHAASKRPLQSSGSNESQRL

SEQ ID NO: 5774 - protein, 451 aa, unidentified
MAKKKAVKVLRKQKKRETLRRFTQKQNIGRACLTAQEFRLLQRMSHSSKALRNVGLYTMKQSYLNYNKMATVKEVDTAMQADMNYWGIQSNSVQAIRRALFTEVKSFFKALEQWKKNPEKFTGRPKFPNYSHSTDKRIIEIYQVPKVDENGFWMIPMSVAFRKKFGSIKIRMPKNLRNKNISYIEIVPKQKGRFFEVHYTYEMHVSQMKKQPMTTSSALGCDLGVDRLVSCVTNTGDAFLIDGKKLKSINQYFNKTIRNLQQKNVENGLSKRIVTNKIAALWHKRERQIHGYIAQTVGLLFKKVKEFDIDTIVVGCNAGWKQNSHMGKKNNQKFVQIPFHKLIAAIENKCIKEGIRFFKQEESYTSKASFLDKDPVPVWSKDDRTQYRFSGKRITRGLYQSKAGTCIHADINGALNTLQKSQVVELDGNLKVKTPILLEVQKRKAVASRIA

SEQ ID NO: 5775 - protein, 413 aa, unidentified
MKLSFKFRPNINPTQLEIIEELSYHTTKLYNIISYDLRKNGFKNYYEIEKLYKNNWHCDFLHSHTRQQMFKILEQNWKSYFASIKDFGVNPSKYKGLPRPPKFKNTERNKNEIIFTNLAIRFQDGILKLSLSKSIQKLFKVDSLNFEVSNKLQSLINWNRLQQARFNYDKVQKCWHLIVIYNKDEVENSNDNVMSIDIGLDNLATITFKNGINQYVYCGKKLKSVNSYANKRIAYLQAIEMKKYGSDKFKNTKEINRLRKYRNNYINDYLHKVSKNIIDKAIKNNVGKIVIGKLKDIKQDMNYNKSFVQIPIQRLVELITYKAKLKGIEIKLQEESYTSGCSAIDLEPVTKKYYNKSRRITRGLFKSGYGILNADINGSLNILRKSEKCIPDLVNAMRDKGNWTHPQRIRIAC

SEQ ID NO: 5776 - protein, 431 aa, unidentified
MYGCQQILIHADKELKSILEFICSESNKLSNCAIYYARQIWFKAKRYINKFELNNELKSNRHFQVLYSQAAQQVCGSVYESFASFKQLNALYRRGELADKPKPPKYRKDGFNLITYPKQALKLKDGQIRIPLGSLVKTWFKLDSFTLPMPSNLRFENIKELKILPRNRCFYAEFVYKNDAIKSDVDKSKVLGIDHGINNWLSCVSNVGTSFIVDGKHVKSLNRWYNKQVATIKENKSQGFWSNKLATLTEKRNRQIRDAINKTARIVLNHCLNNRIGRVVFGWGQGIKKEINLGKKRNQQFVQIPTARLKERIEQLCQQYGIEFVETEEANTSAASFVDGDTLPKHGEKPEGWKSSGRRVKRGLFRTAMNWYINADCNGAANIMGKVSTTLGLDLSGVSRGALTHPTRIYVWVTAKKKRSDAALARRVASF

SEQ ID NO: 5777 - protein, 436 aa, unidentified
MNKEYAQLKERKSQMQLTERHIIKSTEHRFAQIDELAFKSKNLYNAANYVIRQSFIYGWGYVNYNETNRLMKSHEAYKALPAKVSQQILMVLDKNWKSFFEAVKAYKADSSRFTGRPKLPKYKDKVKGRNLLVYTIQAISSKQLKKGVIKLSGTELSMKTQLNPNQICQVRLVPKCDSYVMEVIYDEPESTLGNANSVASIDLGLDNLVALTSNQPGFIPLLINGRPLKSINQFYNKRKSRLQSQLKGNRKTSPRIQRLTRCRNQKVDNYLHHASRVIVDHLVANKIGTLVIGQNAQWKTDINLGKQTNQNFVSIPHSRLIEMLEYKARLVGITVIVQEESYTSRSSFLGLDPIPVYGKTAKEPMFTGKRIKRGLYKTSTGQLINCDINASYNILRKAIPNAFSDGIESCVVGPMRVNPLKVKAKGEGLEASHAYK

SEQ ID NO: 5778 - protein, 415 aa, unidentified
MQLVEKHIISRHHWLYQQLDNLCFLSKNMFNYANYLIRQKFINSGEYLDYYQVQKLCQGTPDYAALPAKVSQQTLLRLDESWKSFFAATKAYNEQKEKFFARPQLPSYKHKNLGRNVVTYTSQAISSTMLKKGIIHLSKTEIFIQTKVKKVNQVRLVPKTYQIVVEVVYEARESSGENQDYEAIAGIDIGLNNLATITSNQKGFRPILVNGRIIKSINAYYNKKRKFRQSRLRGEKKTSRKIQQLTHKRNCKIDNYLHNASRFIINHLVANRIGTLVIGKNDGWKQEINLGKRNNQNFVSIPHARLIEMLTYKAQLVGIKVIVTEESYTSKCSVLDAEPIGKHEQYKGRRIKRGLFRAGDGTLINADVNGSANIIRKVFPNAFTEGIQGVVVRPVRVTPYKMVGEGNWNKCLSNL

SEQ ID NO: 5779 - protein, 408 aa, unidentified
MQLVEKHIIDKNHQFYSELDNLSLMSKNLFNFANYIIRQEFIFKGVYKDYYKVQKLCQGTPDYALPAKVSQQVLLRLHESWKSFFAATIEYGKHPEKFNSIPRLPKYKHKTKGRNVVTYTNQAISKSWLSRGVIHLSLTNIFLTTKVKQPSQVRIVPKTYHYVIEVIYDIAVPSSIEQEAQTIAGIDIGLNNLATITSNKSGFTPIIINGKPLKAINAYYNKKKAVLQSYLKYQIKTSARIKKLTHKRNLLVENYLHHASRYIINHLAANQIGTLVIGKNDGWKQEINLGRRNNQNFVSIPHARFIHLLTYKANLAGIKVIVTEESYTSKCSFLDNEPCVKQASYRGKRVKRGLFRSADGRLINADVNGSANIITKVFPNAFAEGIQGVVVRPVRVTPYKMVGRLRLR

SEQ ID NO: 5780 - protein, 417 aa, unidentified
MDLKALLEFVCIEANSLINCGIYYSRQLYFKTGKLPSKADLHKEIGTLQKNKHYQALYSDTAQQILTGVAESFKSFVGLLKGIKNGTVAQKPKLPNYRTSGGLAVATFTGRSIKLKNGMLRFPLGSLVKTWFGVDSFYLPMPSNLDFKDIREVRILPRNRCFYAEFVYKTNTTIIELDKSKVLGIDHGIDNWLTCVSNTGTSFIVDGLHLKSINQWYNKSVANIKEGKPQGFWSKRLAAITEKRNRTMRDAVNKAARIVINHCIDNKIGTVVFGWNEGQKDGADMGKKNNQKFVQIPTAKLKRRIAQLCEQYGIVFVETEESYTSKSSFIDNDFLPKFGEKPEGWKSSGLRITRGQFQTSTGIKINADCHGAVNIIKKVAAIFKFDLSRVSRGCLSQPKKVRLWTLQKSPSLQRGEA

SEQ ID NO: 5781 - protein, 451 aa, unidentified
MAKKKAVKVLWKQKKRETLRRFTQKQNIGRACLTAQEFRLLQRMSHSSKALRNVGLYTMKQSYLNHNKMATVKEVDTAMQADMNYWGIQSNSVQAIRRALFTEVKSFFKALEQWKENPEKFTGRPKFPNYSHSTDKRIIEIYQVPKVDENGFWMIPMSVAFRKKFGSIKIRMPKNLRNKNISYIEIVPKQKGRFFEVHYTYEMHVSQMKKQPMTTSNALGCDLGVDRLVSCVTNTGDAFLIDGKKLKSINQYFNKTIRNLQQKNVENGLSKRIVTNKIAALWHKRERQIHGYIAQTVGLLFKKVKEFDIDTIVVGYNAGWKQNSHMGKKNNQKFVQIPFHKLIAAIENKCIKEGIRFFKQEESYTSKASFLDKDPVPVWSKDDRTQYRFSGKRITRGLYQSKAGTCIHADINGALNTLQKSQVVELDGNLKVKTPILLEVQKREAVASRIA

SEQ ID NO: 5782 - protein, 269 aa, unidentified
MARKKAVKVLRKQKKRENMQRFTQKQNIGRACLTAKEFRLLQRMSHSSKALRNVGLYTMKQSYLNNNRMATVKEVDTAMQNDMNYSGIQSNSVQAIRRSLFTEVKSFFKALEQWKKNPEKFTGRPKFPNYSRSTDKRIIEIYQVPKVDEKGYWMIPMNVAFRKKFGSIKIRMPKNLRNKNISYIEIVPKQKGRFFEVHYTYEMHVSQMKKQPTTTSNALSCDLGVDRLVSCVTNTGDTFLIDGKKLKSINQYFNKMICNLQQKNMDNGI

SEQ ID NO: 5783 - protein, 451 aa, unidentified
MARKKVVKVLRKQKKRETMQRFTQKQNIGRACLTAKEFRLLQRMAHSSKALRNVGLYTIKQSYLNDNKMATVKEVDNAMQADMNYSGVQSNSVQAIRRALFTEMKSFFKALEQWKKHPDKFTGRPKFPNYSRSTDKRIIEIYQVPKVDENGYWMVPMNVAFRKKFGSIKIRMPKNLRNKNISYIEIVPKQKGRFFEVHYTYEMHVSQVKKQPTTTSNALSCDLGVDRLVSCVTNTGYAFLIDGKKLKSINQYFNKTIRNLQLKNMENGLSKRLVTNKIAALWHKRERQINGYIAQTVGLLFKKVKEFDIDTIVVGYNAGWKQKSHMGKKNNQTFVQIPFEKLMAAIENKCIKEGIRFFKQEESYTSKASFLDKDPVPVWSKDDKTQYRFSGKRITRGLYQSKAGTCIHADINGALNTLKKSKIVELDDNLKVKTPILLDVQKRKAIASRIA

SEQ ID NO: 5784 - protein, 451 aa, unidentified
MARKKAVKVLRKQKKRENMQRFTQKQNIGRACLTAKEFRLLQRMAHSSKALRNIGLYTMKQSYLNNNRMATVKEVDAAMQADMNYSGIQSNSVQAIRRSLFTEVKSFFKAMEQWKKNPEKFTGRPKFPNYSRSTDKRMIEIYQVPKVDENGYWMIPMNVAFRKKFGSIQIRTPKNLRNKNISYIEIVPKQKGRFFEVHYTYEMHVSQMKKPPTTTSNTLSCDLGVDRLLSCVTNTGDAFLMDGKKLKSINQYFNKMICNLGQKNMDNGISKRIVTNKMAALWHKRERQINGYIAQTVGLLFKKVKEFNLDTIVVGYNAGWKQKSHMGKKNNQKFVQIPFQKLIAAIENKCVKEGIRFFKQEESYTSKASFLDKDPVPVWSKDDKTQYRFSGKRITRGLYQSKAGTCIHADMNGALNTLKKSGVVELDDNLKVKTPILLEVQKRKAVASRIA

SEQ ID NO: 5785 - protein, 451 aa, unidentified
MTRKKAVKVLRKQKKRENMQRFTQKQNIGRACLTAKEFRLLQRMSHSSKALRNVGLYTMKQSYLNHNRMATVKEVDTAMQADTNYWGVQSNSVQAIRRALFTEVKSFFKALEQWKKNPEKFTGRPKFPNYSRSTDKRIIEIYQVPKVDENGYWMIPMNVAFRKKFGSIKIRMPKNLRNKNISYIEIVPKQKGRFFEVHYTYEMHVSQMKKPSTTTSNALSCDLSVDRLLSCVTNTGDAFLIDGKKLKSINQYFNKIICNLQQKNMDNGISKRIVTNKIAALWHKRERQINGYIAQALGLLFKKVKEFDIDTVVVGYNTGWKHKSHMGKKNNQKFVQIPFQKLIAAIENKCVKEGIRFFKQEESYTSKASFLDKDPVPVWSKDDKTQYRFSGKRITRGLYQSKAGTCIHADINGALNILKKSGVVELDENLKVKTQILLEVQKRKAIASRIA

SEQ ID NO: 5786 - protein, 409 aa, unidentified
MIKPDKKLKAVLEYICQESNKLHNCAVYYVRQIYFKCHIFVRPFDIINELKRNPHYGALCAQAAQQTCGAVGESVKSFKGLMKLFREGKLESRPKFPNYRTPGGLHLIAYPKQALGKKLIDGRISIPLGQKVKAWFGLKNFQIQMPSNLDYTDIREVRILPRNGCFYAEFVYKLVSIQVNTDDQKVLGIDRGIDNWLTCISNANTSFIVDGKHLKSLNQWYNKRVAALMDGKPNGFWSHQLARLTEKRNRQMRDAVNKAAKIVINHCLENQIGTVVFGWNKGQKNSVNMGLKTNQKFVQIPTGRLKTRISQLCEKYGIRFIETEESYTSKASFVDSDFLPAIGAKPDGWKESGRGIKRGLYRTNLQNWYINADCNAAGNIIRKVATMLGLDLSGVGRGALTAPLRIAVW

SEQ ID NO: 5787 - protein, 451 aa, unidentified
MAKKKAVKVLWKQKKRETLRRFTQKQNIGRACLTAQEFRLLQRMSHSSKALRNVGLYTMKQSYLNHNKMATVKEVDTAMQADMNYWGIQSNSVQAIRRALFTEVKSFFKALEQWKKNPEKFTGRPKFPNYSHSTDKRIIEIYQVPKVDENGFWMIPMSVAFRKKFGSIKIRMPKNLRNKNISYIEIVPKQKGRFFEVHYTYEMHVSQMKKQPMTTSNALGCDLGVDRLVSCVTNTGDAFLIDGKKLKSINQYFNKTIRNLQQKNVENGLSKRIVTNKIAALWHKRERQIHGYIAQTVGLLFKKVKEFDIDTIVVGYNAGWKQNSHMGKKNNQKFVQIPFHKLIAAIENKCIKEGIRFFKQEESYTSKASFLDKDPVPVWSKDDRTQYRFSGKRITRGLYQSKAGTCIHADINGALNTLQKSQVVELDGNLKVKTPILLEVQKRKAVASRIA

SEQ ID NO: 5788 - protein, 451 aa, unidentified
MARKKAVKVLRKQKKRENIQRFTQKQNIGRACLTAKEFRLLQRMSHSSKALRNVGLYTIKQSYLNNNRMATIKEVDTAMQADMNYWGMQSNSVQAIRRALFTEVKSFFKALEQWKKKPETFTGRPKFPNYSRSTDKRIIEIYQVPKVDENGYWIIPMNVAFRKKFGSIQIRMPKNLRNKKISYIEIVPKQKGRFFEVHYTYEMHVSQMKKQFTTTSNALSCDLGVDRLVSCATNTGDAFLIDGKKLKSINQYFNKMIRNLQQKNIENGLSKRVVTNKMAALWHKREQQINGYISQTVGLLFKKVKEFDIDTIVVGYNTGWKQKPDMEKKNNQKFVQIPFHKLIAAIENKCVKEGIRFLKQEESYTSKASFLDKDPVPVWSKDGKTHYCFSGKRLTRGLYQSKAGTYIHADINGALNILQKSKVVECDDNLKVKTPILLEVQKRKAVASRIA

SEQ ID NO: 5789 - protein, 451 aa, unidentified
MARKKAVKVLHKQKKRETIQRFTQKQNIGRACLTAKEFRLLQRMSHSSKALRNVGLYTMKQSYLNHSKMATVKEVDTAMQADMNYWGIQSNSVQAIRRALYAEVKSFFKALEQWRKKPETFTGRPKFPHYSGSTDKRIIEIYQVPKVDDNGYWMIPMNVAFRKKFGSIQIRMPKNLRNKKISYIEIVPKQKGRFFEVHYTYEMHVSQMKKQFTTTSNALSCDLGVDRLVSCATNTGDAFLIDGKKLKSINQYFNKMIRNLQQKNIENGLSKRVVTNKMAALWHKREQQINGYISQTVGLLFKKVKEFDIDTIVVGYNTGWKQKSDMGKKNNQKFVQIPFHKLIAAIENKCVKEGIRFLKQEESYTSKASFLDKDPVPVWSKDGKTHYCFSGKRLTRGLYQSKAGTCIHADINGALNTLQKSRVVELDDNLTVKTPILLEVQKRKAVASCIA

SEQ ID NO: 5790 - protein, 451 aa, unidentified
MARKKAVKVLRKQKKRETMQQFTQKQNIGRACLTAKEFRLLQRMSHSSKALRNVGLYTIKQSYLNHNRVATVKEVDNAMQADMNYSGVQSNSVQAIRRALFTEVKSFFKALEEWKKHSDKFTGRPKFPNYSRSTDKRIIEIYQVPKVDENGYWIIPMNVAFRKKFGSIRIRMPKNLRNKNISYIEIVPKQKGRFFEVHYTYEMHVSQMKKQPMTTSNALGCDLGVDRLVSCVTNTGDAFLIDGKKLKSINQYFNKTIRNLQQKNVENGLSKRIVTNKIAALWHKRERQIHGYIAQTVGLLFKKVKEFDIDTIVVGYNAGWKQKSHMGKKNNQTFVQIPFEKLIAAIENKCIKEGIRFFKQEESYTSKASFLDKDPVPVWSKDDRTQYRFSGKRITRGLYQSKAGTCIHADMNGALNTLKKSGVVELDDNLKVKTPILLEVQKRKAVASRIA

SEQ ID NO: 5791 - protein, 451 aa, unidentified
MARKKAVKVLRKQKKRENTQRFTQKQNIGRACLTAKEFRLLQRMSHSSKALRNVGLYTMKQSYLNHNRMATVKEVDTAMQNDMNYSGVQSNSVQAIRRALFTEVKSFFKALEQWKKNPEKFTGRPQFPNYSRSTDKRIIEIYQVPKVDENGYWMIPMNVAFRKKFGSIKIRMPKNLRNKNISYIEIVPKQKGRFFEVHYTYEMHVSQMKKPPTTTSNALSCDLGVDRLLSCVTNTGDAFLIDGKKLKSINQYFNKMICNLGQKNMDNGISKRIVTNKMAALWHKRERQINGYIAQTVGLLFKKVKEFDIDTIVVGYNAGWKQNSHMGKKNNQKFVQIPFQKLMAAIENKCVKEGIRFFKQEESYTSKASFLDKDPVPVWSKDDKTQYRFSGKRITRGLYQSKAGTCIHADINGALNTLKKSGVVQSDGNLKVKTPILLEVQKRKAIALCIA

SEQ ID NO: 5792 - protein, 430 aa, unidentified
MHLFGCQPVLLSPVPDIKAILEYVCTESNKLFNCATYYARQIYFKTRKYVGKSRLDEEMKSNPHFQAMHSQAAQQTCHGVWEAFKSYRELLALWKRGELEDKPKLPKYRDAGLSVASYPKQALKLVDGLIRVPLGSKVKAWFGIASFTLPMPSNLRFEDIRELRILPRNRCFYAEFVYRQPEPAPIQLDLSRALGIDHGIDNWLTCVSTVGESFIVDGRQVKSLNQWYNKEVARLKEGQNQGFWSNQLAHITERRNRQIRDAINKAARIVINYCLKNRIGTIVFGWGQGIKQSVNLGKKNNQKFVFIPTARLKERIAQLAQQYGMQFVETEEANTSAASFLDGDSLPKHGEKPDDWKPSGKRVKRGLYRTLLNWYINADANGGANILQKVSMMLGLDLSKVSRAALTQPQRFRLWQLARKSEAVRLQPTA

SEQ ID NO: 5793 - protein, 431 aa, unidentified
MIHLFGCQPVLLSPVPDIKAILEYVCTESNKLFNCATYYARQIYFKTRKYVGKSRLDEEMKSNPHFQAMHSQAAQQTCHGVWEAFKSYRELLALWKRGELEDKPKLPKYRDAGLSVASYPKQALKLVDGLIRVPLGSKVKAWFGIASFTLPMPSNLRFEDIRELRILPRNRCFYAEFVYRQPEPAPIQLDLSRALGIDHGIDNWLTCVSTVGESFIVDGRQVKSLNQWYNKEVARLKEGQNQGFWSNQLAHITERRNRQIRDAINKAARIVINYCLKNRIGTIVFGWGQGIKQSVNLGKKNNQKFVFIPTARLKERIAQLAQQYGMQFVETEEANTSAASFLDGDSLPKHGEKPDDWKPSGKRVKRGLYRTLLNWYINADANGGANILQKVSMMLGLDLSKVSRAALTQPQRFRLWQLARKSEAVRLQPTA

SEQ ID NO: 5794 - protein, 370 aa, unidentified
MSNVANYICRQHFFATGKKYSLPDLYHLVKDYVDYRALPTKVSKQIIKGLVSTWTGYFQAHKEWQKNPSKLLGEPRIPGYKDKAKGRNVVIYYHESVYKAELKKGICHLSMSDIKIPTKVDNVIEVRLVPRPTCYVVEIVYEKEEQEQCTSNYVAGIDLGLTNLVALTSNQPGFKPLLVNGRPLKSVNQFYHKTKAKLQAQLGDQRKTSKRIQLMTAYRNNYVDNYLHNTSRTIVNLLQACDIGTLVIGKNDNWKQNINIGKKNNQSFTQIPHARLIDQLTYKCQLAGIKVIVTEESYTSKCSALDLEPIQKHSIYLGKRVKRGLFKSAQGILLNADCNGSANIVRKVFPNAFANGIGSVAVTPIKVMPL

SEQ ID NO: 5795 - protein, 426 aa, unidentified
MRSMNQKSRKRKAETITLTEKHLFRKDDPAFRELDDLTFRSKNLYNSTLYAMRQYFFEHRCFPGYRKVNADFTHENQPDYRALPAKVAKHVQMMADEACRSFLTLNALHREGKLQDRPKLPGYMDKTKGRQVLHYEKGAISRPWLQKGIIHLSGTELYIPTGADPAKVQFVRIVPAGGAFAVEVGYREELPELKEGPSRIAALDLGVNNLAVCCSNVSGPVLIDGKYLKSINQRSNKAIAKAKAEARKKNGQNMTVRIRAMYLRRNNRILDYMHKATRYLVNHFVSSQIDTVVIGHSKGWKQDTDMGKRTNQNFCQIPFNMFISMLCYKCRMAGIRAVCTEESYTSKCSFLDDEECRKHKEYMGRRVHRGLFRSHDGTVINADLNGSLNILKKEMQKMDAWNDTLYRQCVEHNLKTDLVRYKVPRS

SEQ ID NO: 5796 - protein, 428 aa, unidentified
MQLVERHIIQRNHPHYQEIDQLCFAAKNLYNYANFHIRQSFILSQKYLDYNCLAKQLKSTEPYQALPAKIAQQVLLGLHRNWLSFFAAIKVYTENKSKFLGRPKLPKYKHKDKGRHLLVYTAQSVSKPKMKAGVIHLSKTQIDIPTKVDYVHLNQVRIVPKIDHYVIEAVYEKQELDYDLDSNAIAAIDLGIDNLAALTSNQPGFLPVLVSGRIIKSINRYYNQRKAKLQSLLPSHQKTSKQLQSLTKKRNFRVDDYLHKASRLVIDHLVKQGLGTLVIGQNLLWKQNIDLGKRNNQNFVCIPHNRFVQQLIYKAKLVGIKVLISEESYTSVASFLDQDIIPTYGKADAKEVKASTSLGFNTERSRSVKFSGRRIRTKLYKAGNGKLIHADVNGSLNILRKVVPTAFSLGIGGVVVRPVGIIPGKQMA

SEQ ID NO: 5797 - protein, 412 aa, unidentified
MQLVERHIIQRNHPHYQEIDQLCFAAKNLYNYANFHIRQSFILSQKYLDYNCLAKQLKSTEPYQALPAKVAQQVLLGLHRNWLSFFAAIKVYTEDKSKFLGRPKLPKYKHKDKGRHLLVYTAQSVSKPKMKAGVIHLSKTQIDIPTKVECVHLNQVRIVPKIDHYVLEAVYEKEELDDDLDSNAIAAIDLGIDNLATLTSNQPGFLPVLVSGRIIKSINRYYNQRKAKLQSLLPSHQKTSKQLQSLTKKRNFRVDDYLHKASRLVIDHLVKQGLGTLVIGQNLLWKQNANLGKRNNQNFVCIPHNRFVQQLIYKTKLVGIKVLVSEESYTSVASFLDQDIIPTYGKADAKEVKFSGRRIRTKLYKAGNGQLIHADVNGSLNILRKVVPTAFSLGIGGVVVRPVGVIPGKQMA

SEQ ID NO: 5798 - protein, 420 aa, unidentified
MAKAKKLMGVQQNRISTDQDTEAILEYLCTESNKLSNCAVYYARQIYFKTRKFVTSFDLVKAVGKNKHFSALPSEVAVQTCLSVGESVKSFSELIKKSERGELSQKPKFPNYRKPGLNLIAFPKRALKLINGKIRFPLGLQIKAWFGLKEFFLPMPSNLCFDLIKEVRILPRNRELYIEFVYEVAASTVRLDQSKVLGIDHGINNWLTCVSNVGTSFLVDGLHLKSLNQWYNKSVAKIKENKSQGFWSNRLAAITEKRNRQMRDAVNKAARIVINHCVENNIGSIVFGWNQGQKDGADMGKKNNQKFVQIPTAKLKTRIEQLCEQYGIDFIETEESYTSKTSFLDNDVLPTIGAKPEGWKSSGIRTNRGLFKTLTGIKINADCNGAANIIRKVAMMVTFDLTGISRGCLSQPKKVLLWTL

SEQ ID NO: 5799 - protein, 412 aa, unidentified
MQLVERHIIQRNHPHYQEIDQLCFAAKNLYNYANFHIRQSFILTQKYLDYNCLAKQLKSTEPYQALPAKVAQQVLLGLHHNWLSFFAAIQVYTEDKSKFLGRPKLPKYKHKDKGRHLLVYTAQSVSKPKMKAGVIHLSKTQIEIPTKVEYVHLNQVRIVPKIDHYVLEAVYEKEELDDDLDSNAIAAIDLGIDNLATLTSNQPGFLPVLVSGRIIKSINRYYNQRKAKLQSLLPSHQKTSKQLQSLTKKRNFRVDDYLHKASRLVIDHLVKQGLGTLVIGQNPLWKQNANLGKRNNQNFVCIPHNRFVQQLIYKAKLVGIKVLVSEESYTSVASFLDQDIIPTYGKADAKEVKFSGRRIRTKLYKAGNGKLIHADVNGSLNILRKVVPTAFSLGIGGVVVRPVGIIPGKQMA

SEQ ID NO: 5800 - protein, 451 aa, unidentified
MARKKAVKVLRKQKKRENMQRFTQKQNIGRACLTAKEFRLLQRMSHSSKALRNVGLYTIKQSYLNNNKMATVKEVDTAMQTDMNYWGIQSNSVQAIRRTLFTEVKSFFKAMEQWKKNPETFTGRPKFPNYSRSTDKRIIEIYQIPKVDDNGYWLIPMNVAFRKKFGSIKIRMPKNVRNKKISYIEIVPKQKGRFFEVHYTYEMHVSQMKKQPTTTSNALSCDLGVDRLLSCVTNTGDAFLIDGKKLKSINQYFNKMIRNRQQKNIENGLSKRVVTNQMAALWHKRERQINGYISQTVGLLFKKVKAFSIDTVVVGYNAGWKQKSDMGKKNNQKFVQIPLHKLIAAIENKCVKEGIRFLKQEESYTSKASFLDKDPIPVWSKDDRTYHRFNGKRITRGLYQSKSGKCIHADINGALNTLEKSRVVELDENLKVRTPILLEVQKRKAVASRIA

SEQ ID NO: 5801 - protein, 472 aa, unidentified
MDWSKVINNYKIISLRKVVKPMTKKKAVKVLRKQKKRETLQRFTQKQNIGRACLTAKEFRLLQRMSHSSKALRNVGLYIIKQSYLNNNKMATVKEVDTAMQADMNYSGMQSNSVQAIRRALFTEVKSFFKAWEQWKKKPETFTGRPKFPNYSRSTDKRIIEIYQVPKVDDNGYWMIPMNVAFRKKFGSIKIRMPKNLRNKKISYIEIVPKQKGRFFEVHYTYEMHVSQMKKPSTTTSNALSCDLGVDRLLSCVTNTGDTFLIDGKKLKSINQYFNKMIRNLQQKNMDNGISKRIVTNQVAALWHKRERQINGYISQTVGLLFKKVKACNIDTVVVGYNAGWKQKSDMGKKNNQKFVQIPFHKLIVAIENKCVKEGIRFLKQEESYTSKASFLDKDSVPAWSKDDRTHYRFSGKRINRGLYQSRAGICIHADINGALNTLQKSKVVQLDDNLKVKTPILLEVQKRKAVASRIA

SEQ ID NO: 5802 - protein, 472 aa, unidentified
MDWSKVINNYKIISLRKVVKPMTKKKAVKVLRKQKKRETLQRFTQKQNIGRACLTAKEFRLLQRMSHSSKALRNVGLYIIKQSYLNNNKMATVKEVDTAMQADMNYSGMQSNSVQAIRRALFIEVKSFFKAWEQWKKKPETFTGRPKFPNYSRSMDKRIIEIYQVPKVDDNGYWMIPMNVAFRKKFGSIKIRMPKNLRNKKISYIEIVPKQKGRFFEVHYTYEMHVSQMKKPSTTTSNALSCDLGVDRLLSCVTNTGDTFLIDGKKLKSINQYFNKMIRNLQQKNMDNGISKRIVTNQMAALWHKRERQINGYISQTVGLLFKKVKACNIDTVVVGYNAGWKQKSDMGKKNNQKFVQIPFHKLIVAIENKCVKEGIRFLKQEESYTSKASFLDKDSVPAWSKDDRTHYRFSGKRINRGLYQSRAGICIHADINGALNTLQKSKVVQLDDNLKVKTPILLEVQKRKAVASRIA

SEQ ID NO: 5803 - protein, 451 aa, unidentified
MAKKKAVKVLRKQKKSENLQRFTQKQNIGRACLTAKEFRLLQRMSHSSKALRNVGLYTIKQNYLNHNKMATVKEVDTAMQADMNYSGIQSNSVQAIRRALFTEVKSFFKAWEQWKKKPETFTGRPKFPNYSRSTDKRIIEIYQVPKVDDNGYWMIPMNVAFRKKFGSIKIRMPKNLRNKKISYIEIVPKQKGRFFEVHYTYEMHVSQMKKHSTTTSNALSCDLGVDRLLSCVTNTGDAFLIDGKKLKSINQYFNKMIRNLQLKNVENGLSKRVVTNKMAALWHKRERQINGYISQTVGLLFKKVKECNIDTVVVGYNAGWKQKSDMGKRNNQTFVQIPFHKLVAAIENKCVKEGIRFLKQEESYTSKASFLDKDRIPVWSKDDRTHYRFSGKRITRGLYQSKAGTCIHADINGALNTLQKSKVVELDGNLKVKTPVLLEVQKRKAVASCIA

SEQ ID NO: 5804 - protein, 451 aa, unidentified
MARKKAVKVLRKQKKRENMQRFTQKQNIGRACLTAKEFRLLQRMAHSSKALRNIGLYTMKQSYLNNNRMATVKEVDAAMQADMNYSGIQSNSVQAIRRSLFTEVKSFFKAMEQWKKNPEKFTGRPKFPNYSRSTDKRMIEIYQVPKVDENGYWMIPMNVAFRKKFGSIQIRMPKNLRNKNISYIEIVPKQKGRFFEVHYTYEMHVSQMKKPPTTTSNALSCDLGVDRLLSCVTNTGDAFLMDGKKLKSINQYFNKMICNLGQKNMDNGISKRIVTNKMAALWHKRERQINGYIAQTVGLLFKKVKEFNLDTIVVGYNAGWKQKSHMGKKNNQKFVQIPFQKLIAAIENKCVKEGIRFFKQEESYTSKASFLDKDPVPVWSKDDKTQYRFSGKRITRGLYQSKAGTCIHADMNGALNTLKKSGVVELDDNLKVKTPILLEVQKRKAVASRIA

SEQ ID NO: 5805 - protein, 451 aa, unidentified
MVKKKAVKVLRKQKKRETMQRFTQKQNIGRACLTAKEFRLLQRMSHSSKALRNVGLYTIKQSYLNNNKMATVKEVDTAMQADMNYSGVQSNSVQAIRRALFTEVKSFFKALEQWKKKPETFTGRPKFPNYSRSTDKRIIEIYQVPKVDDNGYWMIPMNVAFRKKFDSIKIRMPKNVRNKKISYIEIVPKQKGRFFEVHYTYEMHVSQMKKPSTTTSNALSCDLGVDRLVSCATNTGDTFLIDGKKLKSINQYFNKMIRNLQLKNMENGLSKRVVTNQMAALWHKRERQINGYISQTVGLLFKKVKACNIDTVVVGYNAGWKQKSDMRKKNNQKFVQIPFHKLIAAIENKCIKEGIRFLKQEESYTSKASFLDKDKVPVWSKEDRTHYHFSGKRITRGLYQSKAGTCIHADINGALNTLQKSKVVELDENLKVKTPILLEVQTRKAVASRIA

SEQ ID NO: 5806 - protein, 451 aa, unidentified
MARKKAVKVLRKQKKRENIQRFTQKQNIGRACLTAKEFRLLQRMSHSSKALRNVGLYTIKQSYLNNNKIATVKEVDTAMQADMNYWGVQSNSVQAIRRALFTEVKSFFKALEQWKKNPEKFTGRPKFPNYSRSTDKRIIEIYQVPKVDENGYWIIPMNVAFRKKFGSIQIRMPKNLRNKKISYIEIVPKQKGRFFEVHYTYDMHVSQMKKQSTTTSNALSCDLGVDRLVSCATNTGDTFLIDGKKLKSINQYFNKTIRNLQQKNMENGISKRVVTNQMAAIWHKREKQINGYISQTVGLLFKKVKEFDIDTIVVGYNTGWKQKSDMGKKSNQTFVQIPFHKLIAAIENKCVKEGIRFLKQEESYTSKASFLDKDPVPVWSKDDRTQYRFSGKRITRGLYQSKAGTCIHADINGALNTLQKSRVIEWDDNLRVKTPLLLEVQKRKAVVSRIA

SEQ ID NO: 5807 - protein, 451 aa, unidentified
MARKKAMKVLRKQKKRENMQRFTQKQNIGRACLTAKEFRLLQRMSHSSKALRNVGLYTMKQSYLNHNRMATVKEVDTAMQNDMNYSGIQSNSVQAIRRALYAEVKSFFKALEQWKKNPEKFTGRPKFPNYSRSTDKRIIEIYQVPKVDENGYWIIPMNVAFRKKFGSIKIRMPKNLRNKNISYIEIVPKQKGRFFEVHYTYEMHVSQMKKPSTTTSNALSCDLGVDRLVSCVTHTGDTFLIDGKKLKSINQYFNKMICNLQQKNMDNGISKRIVTNKMAALWHKRERQINGYIAQTVGLLFKKVKEFDIDTIVIGYNAGWKQNSHMGKKNNQKFVQIPFQKLMAAIENKCVKEGIRFFKQEESYTSKASFLDKDPVPVWSKDDKTQYRFSGKRITRGLYQSKAGTCIHADINGALNTLKKSKVVELDENLKVKTPILLEVQKRKAVTSRIA

SEQ ID NO: 5808 - protein, 451 aa, unidentified
MAKKKAVKVLRKQKKRETLRRFTQKQNIGRACLTAQEFRLLQRMSHSSKALRNVGLYTMKQSYLNNNKIATVKEVDTSMQTDMNYSGVQSNSVQAIRRALFTEVKSFFKALEQWKKNPEKFTGRPKFPNYSHSTDKRIIEIYQVPKVDENGFWMIPMSVAFRKKFGSIKIRMPKNLRNKKISYIEIVPKQKGRFFEVHYTYEMHVSQMKKQSMTTSNALSCDLGVDRLVSCVTNTGDAFLIDGKKLKSINQYFNKMIGNLGRKNMDNGISKRIVTNKMAALWHKRERQINGYIAQTVGLLFKNVKEFDIDTIIVGYNAGWKQNSHMGKKSNQKFVQIPFHKLIAAIENKCIKEGIRFFKQEESYTSKASFLDKDPVPVWFKDDKTQYRFSGKRMTRGLYQSKAGTCIHADINGALNTLKKSGVVELDDNLKVKTPILLEVQKRKASASRIA

SEQ ID NO: 5809 - protein, 451 aa, unidentified
MAKKKAVKVLRKQKKRETLRRFTQKQNIGRACLTAQEFRLLQRMSHSSKALRNVGLYTMKQSYLNHNKMATVKEVDAAMQADMNYWGIQSNSVQAIRRALFTEVKSFFKALEQWKKNPEKFTGRPKFPNYSHSTDKRIIEIYQVPKVDENGFWMIPMSVAFRKKFGSIKIRMPKNLRNKNISYIEIVPKQKGRFFEVHYTYEMHVSQMKKQPMTTSNALGCDLGVDRLVSCVTNTGDAFLIDGKKLKSINQYFNKTIRNLQQKNVENGLSKRIVTNKIAALWHKRERQIHGYIAQTVGLLFKKVKEFDIDTIVVGYNAGWKQNSHMGKKNNQKFVQIPFHKLIAAIENKCIKEGIRFFKQEESYTSKASFLDKDPVPVWSKDDRTQYRFSGKRITRGLYQSKAGTCIHADINGALNTLQKSQVVELDGNLKVKTPILLEVQKRKAVASRIA

SEQ ID NO: 5810 - protein, 451 aa, unidentified
MAKKKAVKVLRKQKKRETLRRFTQKQNIGRACLTAQEFRLLQRMSHSSKALRNVGLYTMKQSYLNHNKMANVKEVDIAMQADMNYWGIQSNSLQAIRRALFTEVKSFFKALEQWKKNPEKFTGRPKFPNYSHSTDKRIIEIYQVPKVDENGFWMIPMSVAFRKKFGSIKIRMPKNLRNKNISYIEIVPKQKGRFFEVHYTYEMHVSQMKKQPMTTSNALGCDLGVDRLVSCVTNTGDAFLIDGKKLKSINQYFNKTIRNLQQKNVENGLSKRIVTNKIAALWHKRERQIHGYIAQTVGLLFKKVKEFDIDTIVVGYNAGWKQNSHMGKKNNQTFVQIPFHKLIAAIENKCIKEGIRFFKQEESYTSKASFLDKDPVPVWSKDDRTQYRFSGKRITRGLYQSKAGTCIHADINGALNTLQKSQVVELDGNLKVKTPILLEVQKRKAVASRIA

SEQ ID NO: 5811 - protein, 451 aa, unidentified
MARKKAVKVLRKQKKRENTQRFTQKQNIGRACLTAKEFRLLQRMSHSSKALRNVGLYTMKQSYLNHNRMATVKEVDTAMQNDMNYSGVQSNSVQAIRRALFTEVKSFFKALEQWKKNPEKFTGRPQFPNYSRSTDKRIIEIYQVPKVDENGYWMIPMNVAFRKKFGSIKIRMPKNLRNKNISYIEIVPKQKGRFFEVHYTYEMHVSQMKKPPTTTSNALSCDLGVDRLLSCVTNTGDAFLIDGKKLKSINQYFNKMICNLGQKNMDNGISKRIVTNKMAALWHKRERQINGYIAQTVGLLFKKVKEFDIDTIVVGYNAGWKQNSHMGKKNNQKFVQIPFQKLMAAIENKCVKEGIRFFKQEESYTSKASFLDKDPVPVWSKDDKTQYRFSGKRITRGLYQSKAGTCIHADMNGALNTLKKSGVVQLDGNLKVKTPILLEVQKRKAIALCIA

SEQ ID NO: 5812 - protein, 451 aa, unidentified
MAKKKAVKVLRKQKKRETLRRFTQKQNIGRACLTAQEFRLLQRMSHSSKALRNVGLYTMKQSYLNHNKMATVKEVDIAMQADMNYWGIQSNSLQAIRRALFTEVKSFFKALEQWKKNPEKFTGRPKFPNYSHSTDKRIIEIYQVPKVDENGFWMIPMSVAFRKKFGSIKIRMPKNLRNKNISYIEIVPKQKGRFFEVHYTYEMHVSQMKKQPMTTSNALGCDLGVDRLVSCVTNTGDAFLIDGKKLKSINQYFNKTIRNLQQKNVENGLSKRIVTNKIAALWHKRERQIHGYIAQTVGLLFKKVKEFDIDTIVVGYNAGWKQNSHMGKKNNQKFVQIPFHKLIAAIENKCIKEGIRFFKQEESYTSKASFLDKDPVPVWSKDDRTQYRFSGKRITRGLYQSKVGTCIHADINGALNTLQKSQVVELDGNLKVKTPILLEVQKRKAVASRIA

SEQ ID NO: 5813 - protein, 451 aa, unidentified
MTRKKAVKVLRKQKKRENMQRFTQKQNIGRACLTAKEFRLLQRMSHSSKALRNVGLYTMKQSYLNDNKMATVKEVDTAMQADTNYWGVQSNSVQAIRRALFTEVKSFFKALEQWKKNPEKFTGRPKFPNYSRSTDKRIIEIYQVPKVDENGYWMIPMNVAFRKKFVSIKIRMPKNLRNKNISYIEIVPKQKGRFFEVHYTYEMNVSQMKKPSTTTSNALSCDLGVDRLLSCVTNTGDAFLIDGKKLKSINQYFNKIICNLQQKNMDNGISKRIVTNKIAALWHKRERQINGYIAQALGLLFKKVKEFDIDTVVVGYNAGWKQKSHMGKKNNQKFVQIPFQKLIAAIENKCVKEGIRFFKQEESYTSKASFLDKDPVPVWSKDDKTQYRFSGKRITRGLYQSKAGTCIHADINGALNILKKSGVVELDENLKVKTQILLEVQKRKAIASRIA

SEQ ID NO: 5814 - protein, 451 aa, unidentified
MARKKAVKVLRKQKKRETMQRFTQKQNIGRACLTAKEFRLLQRMSHSSKALRNVGLYTMKQSYLNHNRMATVKEVDTAMQNDMNYSGIQSNSVQAIRRALFTEGKSFFKALEQWKKNPEKFTGHPKFPNYSRSTDKRIIEIYQVPKVDENGYWMIPMNVAFRKKFGSIKIRMPKNLRNKNISYIEIVPKQKGRFFEVHYTYEMHVSQMKKPPTTTSNALSCDLGVDRLVSCVTNTGDAFLIDGKKLKSINQYFNKMICNLQQKNMDNGIAKRIVTNKIAALWHKRERQINGYIAQTVGLLFKKVKEFDIDTIVIGYNAGWKQKSHMGKKNNQKFVQIPFQKLIAAIENKCVKEGIRFFKQEESYTSKASFLDKDPVPVWSKDDKTQYRFSGKRITRGLYQSKAGTCIHADINGALNILKKSGVVELDDNLKVKTPILLEVKKRKAVTSRIA

SEQ ID NO: 5815 - protein, 451 aa, unidentified
MARKKVVKVLRKQKKRETMQRFTQKQNIGRACLTAKEFRLLQRMAHSSKALRNVGLYTIKQSYLNDNKMATVKEVDNAMQADMNYSGVQSNSVQAIRRALFTEMKSFFKALEQWKKHPDKFTGRPKFPNYSRSTDKRIIEIYQVPKVDENGYWMVPMNVAFRKKFGSIKIRMPKNLRNKNISYIEIVPKQKGRFFEVHYTYEMHVSQVKKQPTTTSNALSCDLGVDRLVSCVTNTGYAFLIDGKKLKSINQYFNKTIRNLQLKNMENGLSKRLVTNKIAALWHKRERQINGYIAQTVGLLFKKVKEFDIDTIVVGYNAGWKQKSHMGKKNNQTFVQIPFEKLMAAIENKCIKEDIRFFKQEESYTSKASFLDKDPVPVWSKDDKTQYRFSGKRITRGLYQSKAGTCIHADINGALNTLKKSKIVELDDNLKVKTPILLEVQKRKAIASRIA

SEQ ID NO: 5816 - protein, 451 aa, unidentified
MVRKKAVKVLRKQKKRETMQRFTQKQNIGRACLTAKEFRLLQRMSHSSKALRNVGLYTIKQSYLNNNKMATIKEVDTAMQADMNYSGVQSNSVQAIRRALFTEVKSFFKALEQWKKKPETFTGRPKFPNYSRSTDKRIIEIYQVPKVDDNGYWMIPMNVAFRKKFGSIKIRMPKNVRNKKISYIEIVPKQKGRFFEVHYTYEMHVSQMKKPFTTTSNALSCDLGVDRLVSCATNTGDTFLIDGKKLKSINQYFNKMIRNLQLKNMENGLSKRVVTNQMAALWHKRERQINGYISQTVGLLFKKVKACNIDTVVVGYNAGWKQKSDMGKKNNQKFVQIPFHKLIAAIENKCIKEGIRFLKQEESYTSKASFLDKDKVPVWSKEDRTHYHFSGKRITRGLYQSKAGTCIHADINGALNTLQKSKVVELDENLKVKTPILLEVQTRKAVASRIA

SEQ ID NO: 5817 - protein, 459 aa, unidentified
SLRKVVKTMARKKAVKVLRKQKKRENMQRFTQKQNIGRACLTAKEFRLLQRMSHSSKALRNVGLYTMKQSYLNNNKMATVKEVDTAMQADMNYWGIQSNSVQAIRRALFTEVKSFFKAMEQWQKNPGKFTGRPKFPNYSRSTDKRIIEIYQVPKVDDNGYWMIPMSVAFRQKFGSIKIRMPKNLRHKKISYIEIVPKQKGRFFEVHYTYEMHVSQMKKQSTTTSNALSCDLGVDRLVSCVTNTGDTFLIDGKKLKSINQYFNKMICNLQQKNIENGISKRVVTNRMAALWHKRERQINGYIPQTVGLLFKKVKAFGIDTIVVGYNVGWKQKSDMGKKNNQKFVQIPFHKLIVAIENKCIKEGIRFFKQEESYTSKASFLDKDPVPVWSKDERTHYRFSGKRMTRGLYQSKAGTCIHADINGALNTLQKSRVVELDENLKVKTPILLEAQKRKAVASRIA

SEQ ID NO: 5818 - protein, 451 aa, unidentified
MAKRKAVKVLRKQKKRETLRRFTQKQNIGRACLTAKEFRLLQRMSHSSKALRNVGLYTIKQSYLNHNKMATVKEVDTAMQADMNYWGMQSNSVQAIRRALFTEVKSFFKAMEQWKKNPEKFTGRPKFPNYSRSTDKRIIEIYQVPKVDENGYWMIPMSVAFRQKFGSIKIRMPKNIRNKKISYIEIVPKQKGRFFEVHYTYELHVSQMKKQSTTTSNALSCDLGVDRLVSCVTNTGDTFLIDGKKLKSINQYFNKKIRNLQQKNIENGISKRVVTNKMAVLWHKREKQINGYISQTVGLLFKKVKAFGIDTVVVGYNAGWKQKSDMGKKNNQKFVQIPFHKLIAAIENKCIKEGIRFLKQEESYTSKASFLDKDPVPVWSKDDKTHYYFSGKRITRGLYQSKSGKCIHADINGALNTLEKSRVVEWDDNLKVKTPILLEVQKRKAFASRIA

SEQ ID NO: 5819 - protein, 476 aa, unidentified
MYKTQQIRLTDAINNETRNFLVLLCEQASKLSNQVVYSIRQKHFETCERVEFFDKDGFYRSEFKTKKVSVDSYASLCKEFANSEHYQIMGGQQAQQTIRSVIESFRSYNELLPLFFNGELKGFPCIPGYRKDGLTVVTFPGQAVKLDIETGMCRLAISRELSKDILNDVWIPGGYGFKPHQLVEVRILPRNRELYAEYVYKSGNDDVSCLLGLDHSQALGIDPGTNNWLTCVSTLGKSFIIDGRQIKSLNTNYNRKVKKIKTGKPQGFWNDQLADLTELRNRQMRDAINKTARFIVNYCLNHKIGNVVFGWGEGVKDKITLGKRNNQNFVQIPTSKLKERILTLCEEIGIQFTETEESYTSKTSFLDGDFLPKLGEKPESWKPSGKRVKRGMYKTKNNLVINADCNGAANILVKVKTQLGLCLAKVIREILTVPKRYNVFGSLKKIYRKRSEARFYLASLHQFRIPSALARGEVKL

SEQ ID NO: 5820 - protein, 426 aa, unidentified
MVKTKKLMGVQQNRISTDKDTRAILEYLCTESNKLNNCAVYYARQIYLKTHKFVTGFDLVKAVGKNRHFSALPSEVAVQTCLSVGESVKSFSELIKKSKKGELNLKPKFPNYRKPGLNLIAFPRRSLKLINNQIRFALGLQIKAWFGIKEFFLPMPTNLCFDVIKEVRILPRNRELYIEFVYEVSISTSVLEQSKVLGIDHGINNWLTCVSNIGTSFIVDGLHLKSLNQWYNKSIAKIKENKPQGFWSNRLASITEKRNRQMRHAVNQAAIIVINHCIDHQIGSIVFGWNQGQKDSADLGKKNNQKFVQIPTAKLKNRIEQLCEQYGIEFIETEESYTSKTSFLDNDVLPTIGAKPDGWRSSGVRTNRGLFKSATGIKINADCNGAANILRKVAMIAKFDLAGISRGCLSQPKKVLLWTLQKSQCL

SEQ ID NO: 5821 - protein, 408 aa, unidentified
MKLVERHIITKNHPLWSEIDHKAFLSKNLFNLANYHYRQHFFQHHQKLNFNQLYHLLSQTQDYKALPTKVSKQIIRRLDSAWTSYFQAVKAWKQNPEKFLGQPKIPRYKHKTKGRNILPYSHESISKKALKKGSCQFSMSEIQIPTSPKEIIEARIVPKSSCYVIEIVYEKAEETTNHQQIAGIDLGVNNLMAVTTNQTGVRPLLIKGRPLKAINTFYNKQRSCLQSQLKLKHNQTQSQRLKNLTHKRNCRVENYLHTASRRVIDWCRQHQIGILVIGHNPTWKQSINLGKRNNQQFVNIPHYRLIEMLTYKAQLKGIKVVITEESYTSVASAVDGDDVPKYGEKKPEFQGHRIARGLYKTANDRLLNADVNGSFNITRKVIPDVLDQGIKGLPFNPVVLDPLRMTGL

SEQ ID NO: 5822 - protein, 412 aa, unidentified
MQLVEKHIIDRNHWLYKQLDNLCFLSKNLFNYANYLIRQKFILSEEYLDYYKIQKLCQGTTDYLALPAKVSQQVLLRLHESWKSFFEATKEYSLHPEKFKARPKIPRYKHKTLGRNVLTYTAQAISKQWLNKGIINLSKINIFLTTKVSQVNQVRIVPKTYHDAVEVVDEQKSGNQSSSGVEVIAGIDIGLNNLARITSNQKRFLPLIINGKPRKSINAYYHKKKTVLQSYLKGERKTSIKIEQLTHKRNVKVDNNLHNASRFIVNYLAANRIGTLGIGKNDEWKQEKNLGRRNHQNFVAIPHARFIEMLTYKAELAGIVVKVIEESYTTKCSFLDNEPCVKHSEYKGKRIKRGLFRAGDGRLINADVNGSANIIRKAFPNAYAEGIQGVVVRPVRVTPYKMVVRGKCNICL

SEQ ID NO: 5823 - protein, 408 aa, unidentified
MKLVERHIITKNHPLWSEIDHKSFLSKNLFNLANYHYRQHFFQHHQKLNFNQLYHLLAQTLDYKALPTKVSKQIIRRLDSAWTSYFQAVKAWKQNPEKFLGQPKIPRYKHKTKGRNILPYSHESISKKALKKGICQFSMSEIQIPTSPKEILEARIVPKSSCYVIEIVYEKAEETTNHQQIAGIDLGVNNLMAVTTNQTGVRPLLIKGRPLKAINTFYNKQRSSLQSQLKLKHNQTQCQRLKNLTHKRNCRVENYLHTASRRVIDWCRQHQIGILVIGHNATWKQSINLGKRNNQQFVNIPHYRLIEMLRYKAQLKGIKVVITEESYTSVASAVDGDDVPKYGEKKPEFQGHRIARGLYKTANGRLLNADVNGSFNITRKVIPDVLDQGIKGLPFNPVVLDPLRMTGL

SEQ ID NO: 5824 - protein, 426 aa, unidentified
MKVFQKPFFPYNQNMKLVERHIIAKNHPLWSEIDHLAFLSKNLFNLANYHYRQHFFQHHQKLNFNQLYHLLSQAQDYKALPTKVSKQIIRRLDSAWTSYFQAVKTWQKHPEKFLVKPKIPGYKHKTKGRNILPYSHESISKKALKKGICHLSMSEIQIPTSTKEIIEARIVPKSSCYIIEIVYEKVEETTNHQQIAGIDLGVNNLMAVTTNQTGVRPFLIKGRPLKAINTFYNKQRSSLQSQLKLKHNQTQSQRLKNLTHKRNCRVENYLHTASRRVINWCRQHHIGILVIGHNAKWKQSINLGKRNNQQFVNIPHYRLIEMLNYKAQLKGIKVVITEESYTSVASAVDGDDVPKYGEKKPVFQGKRVARGLYKTAKGRLLNADVNGSFNITRKVIPDVFDQGIKGLPFNPVVLDPLRMTGLSAFE

SEQ ID NO: 5825 - protein, 412 aa, unidentified
MQLVEKHIIDLNHWLYKQLDNLCFLSKNLFNYANYLIRQKFIIAGEYLDYYKIQKLCQGTNDYLALPAKVSQQVLLRLHESWKSFFEATSEYNEHPEKFKARPKIPRYKHKTLGRNVLTYTAQAISQKWLNKGMLNLSKTHIFMTTKVKQVNQVRIVPKNYHYVIEVVYDAEALCQSSSGVEVIAGIDIGLNNLAAITSNLPGFKPLIINGKPLKSINAYYHKNHAFLQSYLKEDRKTSRKIKKLTHQRNCLVDNYLHNASRFIINHLAANRIGTLVIGKNDEWKQGINLGRRNNQNFVAIPHARFIQMLTYKAELAGIAVKVIEESYTSRCSFLDNEPCVKHLEYRGKRIKRGLFRAGDGRLINADVNGSANIVRKAFPNAFAEGIQGVVVRPVRVTPYKTVVRGKCNICL

SEQ ID NO: 5826 - protein, 412 aa, unidentified
MQLVEKHMIDRNHWLYKQLDNLCFLSKNLFNYANYLIRQKFILSVEYLDYYKIQKLCQGTTDYLALPAKVSQQVLLRLHESWKSFFEATKEYSLHPEKFKARPKIPRYKHKTLGRNVLTYTAQAISKEWLNKGIINLSKTNIFLTTKVSQVNQVRIVPKTYHYAVEVVYEQKYVTQSSSGVEGIAGIDIGLNNLATITSNQKRFFPLIINGKPLKSINAYYHKKKTVLQSYLKGERKTSIKIEQLTHKRNVKVDNYLHNASRFIVNYLAANRIGTLVIGKNDEWKQEINLGRRNNQNFVAIPHARFIEMLTYKAELAGIVVKVIEESYTSKCSFLDNEPCVKHSEYKGKRIKRGLFRAGDGRLINADVNGSANIIRKAFPNAYAEGIQGVVVRPVRVTPYKMVVRGKCNICL

SEQ ID NO: 5827 - protein, 451 aa, unidentified
MAKKKAVKVLRKQKKRETLRRFTQKQNIGRACLTAQEFRLLQRISHSSKALRNVGLYTMKQSYLNHNKMATVKEVDTAMQADMNYWGIQSNSVQAIRRALFTEVKSFFKALEQWKKNPEKFTGRPKFPNYSHSTDKRIIEIYQVPKVDENGFWMIPMSVAFRKKFGSIKIRMPKNLRNKNISYIEIVPKQKGRFFEVHYTYEMHVSQMKKQPMTTSNALGCDLGVGRLVSCVTNTGDAFLIDGKKLKSINQYFNKTIRNLQQKNVENGLSKRIVTNKIAALWHKRERQIHGYIAQTVGLLFKKVKEFDIDTIVVGYNAGWKQNSHMGKKNNQKFVQIPFHKLIAAIENKCIKEGIRFFKQEESYTSKASFLDKDPVPVWSKDDRTQYRFSGKRITRGLYQSKAGTCIHADINGALNTLQKSQVVELDGNLKVKTPILLEVQKRKAVASRIA

SEQ ID NO: 5828 - protein, 429 aa, unidentified
MLMYLTQKNHLRVDKKTYKLLRTLTHLSKDLYNLTLYVTRQHYELNGSFLPFVKAYHLLKNSIPYKLLPSQAAQQTMKIVERNYRSFFKLLKERQKGNYNKPTHPPRFLPKDGHFLLIFPYQSFKIKEDKVILTLGRNFAKKFGVMHLEIPLPNNVKDHRIKEVRILPRYNALWFEVEYVYEVQPEKRDLDYSKYLAIDLGVDNFATCVDTTGTAFIVEGRWLKSFNRWWNKKKAKLQSQYDKQGVKFGRRMARLLRKRKSVMNNFMNQAVNYIIKYCLENKIGSIVIGELEEAKQRASLGKVNNQNFQFIPYGLFKRKLKAKCERYGINFVEVDEAYTSKADALALEPLEKKEKYWGKRLCRGLYQSSTGVLINADVNGALNILRKVAGDSSVGRIAGSGRVNRPVRVRLPATGRQMNSHKALSVRAG

SEQ ID NO: 5829 - protein, 450 aa, unidentified
MYLTQKNHLRVDKKTYKLLRILTHLSKDLYNLTLYVTRQHYELNGIFLPYARAYHLLKNSIPYKLLPSQAAQQTMKIVERNYRSFFRLLKERKKGNYNRPIRPPKFLPKDGHFLLIFPYQSFKVKEDKVILTLGRNFAKKFGVMHLEIPLPKNVKGHRIKEIRILPKYNALWFEVEYVYEVEPEKKGLDYSKYLAIDLGVDNFATCVSTTGTAFVVEGRWLKSFNQWWNKKKAKLQSQYDKQGVKFGRRMARLLRKRKNVMNNFMNQAVNYIIKYCLENKIGSIVIGKLEEAKQRISLGKVNNQNFQFIPYGLFKRKLKAKCERYGINFIEVDEAYTSKVDALALEPLEKKEKYWGKRVKRGLFQSSTGVLINADVNGALNILRKVAGDSLVGGIVGSGRVNRPVRVRLPATGRRMNSHKAPSIRAGQFTSFEGLYFRYSSVMSIEKVKN

SEQ ID NO: 5830 - protein, 423 aa, unidentified
MYLTQKNHLRVDKKTYKTLRILSHLSKDLYNLTLYVTRQHYELNSSFLPFVKAYHLVKDSTPYKLLPSQVAQQTMKIVERNYRSFFKLLGERRKGNYHRPIHPPKFLPKNGHFVLIFPYQSFKVEEDRVILTLGRNFAKKFGMMYLEIPLPKNVKGHRIKEVRIIPRYNALWFEVEYVYEVQPEKRDLDYSKYLAIDLGVDNFATCVSSTGTAFIVEGRGLKSFNRWWNKKKAKLQSQYDKQGVKFGKRMARLLRKRKSVMNNFMNQAVNYIIKYCLENKIGSIVIGELEEAKQRASLGKVNNQNFQFIPYGLFKRKLKAKCERYGINFIEVDEAYTSKADALALEPLEKKEEYWGKRIKRGLYQSSTGVLINADVNGALNILRKVAGDSPVRAIVGSGRVNRPVRVRLPATGRQMNSHEAPS

SEQ ID NO: 5831 - protein, 419 aa, unidentified
MHLTQSNQIRGLSKEQFKQLKELCYYAKNLYNVGLYNIRQHYFTEKSFLKYEANYHVAKTNENYKLLQAGVSQQILKVVDRSFKSFFNLIKKAQKGEYRFQDIKMPSYLKKDGLFTLIFSTNAINIKDGFFRVAISNAYKKLHSKPQDILIPFPSRLEGKKIKEVRIVPRNNGQFFNIQYVYEQPYETVDVDTSKALAIDIGLNNLASCVDTDGASFLVDGKKLKSINRLYNKEKARLQSVAMKQGSKYTKRIDSLTLKRNNQVNDYIKKSVRIIINHCVENKIGNLIVGYNEDFKRNINIGKKNNQQFTQIPFGNLREQLYNLCERYGIKYREQEESYTSKASFFDNDELPKWSSADDTEHYFSGKRVKRGLYRTSTGYELNADINGALNILRKSNLLDTSILQARGSLARPSRIRVI

SEQ ID NO: 5832 - protein, 491 aa, unidentified
MTVEEWNYDEEHVHILFRFVPNIDLSKIILMNSLRKVVKTMVKKKAVKVLRKQKKRENMQRFTQKQNIGRACLTAKEFRLLQRMSHSSKALRNVGLYTIKQSYLNHNKMATVKEVDTAMQTDMNYWGIQSNSVQAIRRALFTEVKSFFKALEQWKKKPETFTGRPKFPNYSDSTDKRIIEIYQVPKVDDNGYWMIPMNVAFRKKFGSIKIRMPKNVRNKKISYIEIVPKQKGRFFEVHYTYEMHVSQMKKQSTTTSNALSCDLGVDRLVSCVTNTGDAFLIDGKKLKSINQYFNKMIGNLKQKNVENGLSKRVVTNKMAALWHKRERQINGYISQTVGLLFKKVKACNIDTVVVGYNAGWKQKSDMGKRNNQTFVQIPFHKLLAAIENKCVKEGIRFLKQEESYTSKASFLDKDPIPVWSKDDRTYYRFSGKRITRGLYRSKTGTCIHADINGALNTLQKSRVVELDDNLKVKTPILLEVQKRKAVASRIA

SEQ ID NO: 5833 - protein, 421 aa, unidentified
MSMYLTQKNHLRVDKKTYKLLRILSHLSKDLYNLTLYVTRRHYELNGTFLPYAEAYHLVKDSEPYKLLPSQVAQQTMKIVERNYRSFFRLLKERKKGNYNRPIHPPKFLPKDGHFVLIFPYQSFKVKEDKIVLTLGRNFAKKYGVMYLEIPLPKNVKGHKIKEVRILPRHNALWFEVEYVYEVQPEKKDLDYSKYLAIDLGVDNFATCVDTTGTAFIVEGRWLKSFNRWWNKEKARLQNQYARQGVKFGKKMAWLLRKRKNVMNNFMNQAVNYIIKYCLKNKIGNIVIGELEEAKQRASLGKVNNQNFQYIPYGLFKQKLKAKCERYGINFIEVDEKYTSKADALALEPLVKKEKYWGKRIKRGLYQSSTGVLINADVNGALNILRKVAGDSPVREIAGSGRVTRPVRVRVVPVNSHEAPP

SEQ ID NO: 5834 - protein, 472 aa, unidentified
MDWSKVINNYKIISLRKVVKPMTKKKAVKVLRKQKRRETLQRFTQKQNIGRACLTAKEFRLLQRMSHSSKALRNVGLYIIKQSYLNNNKMATVKEVDTAMQADMNYSGMQSNSVQAIRRALFTEVKSFFKAWEQWKKKPETFTGRPKFPNYSRSMDKRIIEIYQVPKVDDNGYWMIPMNVAFRKKFGSIKIRMPKNLRNKKISYIEIVPKQKGRFFEVHYTYEMHVSQMKKPSTTTSNALSCDLGVDRLLSCVTNTGDTFLIDGKKLKSINQYFNKMIRNLQQKNMDNGISKRIVTNQMAALWHKRERQINGYISQTVGLLFKKVKACNIDTVVVGYNAGWKQKSDMGKKNNQKFVQIPFHKLIVAIENKCVKEGIRFLKQEESYTSKASFLDKDSVPAWSKDDRTHYRFSGKRINRGLYQSRAGICIHADINGALNTLQKSKVVQLDDNLKVKTPILLEVQKRKAVASRIA

SEQ ID NO: 5835 - protein, 451 aa, unidentified
MARKKVVKVLRKQKKRETMQRFTQKQNIGRACLTAKEFRLLQRMAHSSKALRNVGLYTIKQSYLNDNKMATVKEVDNAMQADMNYSGVQSNSVQAIRRALFTEMKSFFKALEQWKKHPDKFTGRPKFPNYSRSTDKRIIEIYQVPKVDENGYWMVPMNVAFRKKFGSIKIRMPKNLRNKNISYIEIVPKQKGRFFEVHYTYEMHVSQVKKQPTTTSNALSCDLGVDRLVSCVTNTGYAFLIDGKKLKSINQYFNKTIRNLQLKNMENGLSKRLVTNKIAALWHKRERQINGYIAQTVGLLFKKVKEFDIDTIVVGYNAGWKQKSHMGKKNNQKFIQIPFEKLMAAIENKCIKEGIRFFKQEESYTSKASFLDKDPVPVWSKDDKTQYRFSGKRITRGLYQSKAGTCIHADINGALNTLKKSKIVELDDNLKVKTPILLEVQKRKAIASRIA

SEQ ID NO: 5836 - protein, 451 aa, unidentified
MTRKKAVKVLRKQKKRETMQRFTQKQNIGRACLTAKEVRLLQRMPHSSKALRNVGLYTMKQSYLNHNKMATVKEVDTTMQADMNYWGIQSNSVQAIRRALYAEVKSFFKAMEKWKKNPEKFTGRPKFPNYSRSTDKRIIEIYQVPKVDDNGYWMIPMSVAFRKKFGSIKIRMPKNLRNKNISYIEIVPKQKGRFFEVHYTYEMHVSQMKKQSATTSNALSCDLGVDRLVSCVTNTGDTFLIAGKKLKSINQYFNKMIRNLQQKNIENGLSKRVVTNQMAALWHKRERQINGYISQTVGLLFKKVKAFGIDTIVVGYNVGWKQRSDMGKKNNQTFVQIPFHKLIAAIENKCIKEGIRFLKQEESYTSKASFLDKDPVPVWSKDDKTYYRFSGKRITRGLYKSKAGTCIHADINGALNTLKKSRVVELDESLKVKTPILLEVQKRKAVASRIA

SEQ ID NO: 5837 - protein, 491 aa, unidentified
MTVEEWNYDEEHVHILFRFVPNIDLSKIILMNSLRKVVKTMVKKKAVKVLRKQKKRENMQRFTQKQNIGRACLTAKEFRLLQRMSHSSKALRNVGLYTIKQSYLNHNKMATVKEVDTAMQTDRNYWGIQSNSVQAIRRALFTEVKSFFKALEQWKKKPDTFTGRPKFPNYSRSTDKRIIEIYQVPKVDDNGYWIIPMNVAFRKKFGSIKIRMPKNLINKQISYIEIVPKQKGRFFEVHYTYEMHLSQMKKQSTTTSNALSCDLGVDRLLSCVTNTGDAFLIDGKKLKSINQYFNKMIGNLKQKNVENGLSKRVVTNKMAALWHKRERQINGYISQTVGLLFKKVKACNIDTVVVGYNAGWKQKSDMGKRNNQTFVQIPFHKLLAAIENKCVKEGIRFLKQEESYTSKASFLDKDRVPVWSKDDRTHYRFSGKRITRGLYRSKTGTCIHADINGALNTLQKSRVVELDDNLKVKTPILLEVQKRKAVASRIA

SEQ ID NO: 5838 - protein, 428 aa, unidentified
MAKPRKMMGVQQILLSPSKDTKVILEYVCSESNKLHNCAVYYARQVWFKSRRFVSGFELVNEMGKNRHFSALSSEAAVQTCLSVGESISSFARLLSQFNKGELEQKPRMPNYRRTGYQVVSFPKRCLKLVNGQVRLPLGLQTKAWFGLKEFFIPMPSNLDFDKIKELRILPRNNCFYAEFVYAVEPIKNGFALSRVLGLDHGINNWLTGVSTVGTKFIIDGRQIKSINQWYNKQVARLMTDKPHGFWSNRLASLTEKRNRQMRDAINKAARLVINHCIENQIGTIVFGWNQGQKQKVNLGDKTNQNFVQIPTGRLKERIKQLCLLYDLRFVETEESYTSQSSFLDADEIPVYGEKPDEWKSSGKRIKRGLFRAADGSVISADCNGAANILRKVAVTLGLDLSGISRGALTTPLRLRFWAIQESQCLQA

SEQ ID NO: 5839 - protein, 451 aa, unidentified
MARKKAVKVLRKQKKRENMQRFTQKQNIGRACLTAKEFRLLQRMSHSSKALRNVGLYTMKQSYLNNNRMATVKEVDTAMQNDMNYSGIQSNSVQAIRRSLFTEVKSFFKALEQWKKNPEKFTGRPKFPNYSRSTDKRIIEIYQVPKVDEKGYWMIPMNVAFRKKFGSIKIRMPKNLRNKNISYIEIVPKQKGRFFEVHYTYEMHVSQMKKQPTTTSNALSCDLGVDRLVSCVTNTGDTFLIDGKKLKSINQYFNKMICNLQQKNMDNGISKRIVTNTMAALWHKRERQINGYIAQTVGLLFKKVKEFNIDTIIVGYNAGWKQKSHMGKKNNQKFVQIPFQKLIAAIENKCVKEGIRFFKQEESYTSKASFLDKDPVPVWSKDDKTQYRFSGKRITRGLYQSKAGTCIHADINGALNTLKKSGVVELDDNLKVKTPILLEVQKRKAIALCIA

SEQ ID NO: 5840 - protein, 451 aa, unidentified
MARKKAVKVLRKQKKRETMQRFTQKQNIGRACLTAKEFRLLQRMAHSSKALRNVGLYTIKQSYLNDNKMATVKEVDTAMQADMNYWGIQSNSVQAIRRTLFTEVKSFFKALEQWKKNPEKFTGRPKFPNYSRSTDKRIIEIYQVPKVDENGYWIIPMNVAFRKKFGSIKIRMPKNLRNKKISYIEIVPKQKGRFFEVHYTYEMHVSQMKKQPTTTSNALSCDLGVDRLVSCVTTTGDAFLIDGKKLKSINQYFNKVIRNLQQKNMENGLSKRIVTNKMAALWHKRERQINGYIAQTVGLLFKKVKEFNIDTIIVGYNAGWKQKSHMGKKNNQKFVQIPFQKLIAAIENKCVKEGIRFFKQEESYTSKASFLDKDPVPVWSKDDKTQYRFSGKRITRGLYQSKAGTCIHADINGALNTLKKSGVVELDDNLKVKTPILLEVQKRKAIALCIA

SEQ ID NO: 5841 - protein, 451 aa, unidentified
MARKKAVKVLRKQKKRETMQRFTQKQNIGRACLTAKEFRLLQRMSHSSKALRNVGLYTIKQSYLNNNKIATVKEVDTAMQADLNYWGMQSNSVQAIRRALFTEVKSFFKALEQWKKKPEAFTGRPKFPNYSRSTDKRIIEIYQVPKVDENGYWIIPMSVAFRKKFGSIKIRMPKNLRNKKISYIEIVPKQKGRFFEVHYTYEMHVSQMKKQSTTTSNALSCDLGVDRLVSCATNTGDTFLIDGKKLKSINQYFNKMICNLQQKNIDNGISKRIVTNQMAALWHKRERQINGYISQTIGLLFKKVKALGIDTVVVGYNVGWKQKSDMGKKNNQKFVQIPFHKLIAAIENKCIKEGIRFFKQEESYTSKASFLDKDPVPVWSKDERTHYHFSGKRITRGLYQSKAGTCIHADINGALNILEKSRVVELDDNLKVKTPILLEVQKRKAVASRIA

SEQ ID NO: 5842 - protein, 451 aa, unidentified
MARKKAVKVLRKQKKRENMQRFTQKQNIGRACLTAKEFRLLQRMSHSSKALRNVGLYTMKQSYLNHNKMATVKEVDTAMQADMNYWGIQSNSVQAIRRALYAEVKSFFKALEQWKKNPEKFTGRPKFPNYSRSTDKRIIEIYQVPKVDDNGYWMIPMSVVFRKKFGSIKIRMPKNIRNKKISYIEIVPKQKGRFFEVHYTYEMHVSQMKQQSTTTSNALSCDLGVDRLLSCVTNTGDAFLIDGKKLKSINQYFNKMIRNLGRKNMDNGISKRVVTNKMAAFWHKRERQINGYISQTVGLLFKKVKAFGIDTVVVGYNTGWKQKSDMGKKNNQTFVQIPFHKLIAAIENKCIKEGIRFLKQEESYTSKASFLDKDPVPVWSKDDRTHYRFSGKRMTRGLYQSKAGTCIHADINGALNTLQKSKVVQLDDNLKVKTPILLEVQKRKAFASRIA

SEQ ID NO: 5843 - protein, 451 aa, unidentified
MARKKAVKVLRKQKKRETMQRFTQKQNIGRACLTAKEFRLLQRMSHSSKALRNVGLYTMKQSYLNHNKMATVKEVDTAMQADMNYSGIQPNSVQAIRRALYAEVKSFFKALEQWKRKQETFTGRPKFPNYSRSTDKRIIEIYQVPKVDNNGYWMIPMNVAFRKKFGSIKIRMPKNLRNKKISYIEIVPKQKGRFFEVHYTYEMHVSQMKKPSTTTSSALSCDLGVDRLVSCATNTGDAFLIDGKKLKSINQYFNKMMRNLQLKNIENGLSKRVVTNRMAALWHKRERQINGYISQTVGLLFKKVKACNIDTVVVGYNAGWKQKSDMGKKNNQTFVQIPFHKLIAAIENKCIKEGIRFLKQEESYTSKASFLNKDPVPVWSKEDRTHYLFSGKRITRGLYQSKAGTCIHADINGALNTLQKSKVVELDDNLKVKTPILLEVQKRKAVASRIA

SEQ ID NO: 5844 - protein, 420 aa, unidentified
MFGCQQILIKTDKDTQAIIEYLCTESNTLYNCSVYYGRQIWFKTRKIVTGFDLTSEMKTNKHFNAGYASSMQQTCINVGEAFKSFKQLLAKAKKDTLDQKPKVPNYRKPGGMFTITYPKKWLKLKNNLIRFPLGNQVKAWFGITDFHLPMPSNLNWTEIKEIRILPRNRCFYAEFIYQQPTKTFETDQAKVLGIDHGINNWLTCVSNVGTSIIIDGLHLKSLNQWYNKSVAKIKENKPQGFWSNRLAAITEKRNRQMRDAVNKAAIIVINHCLENKIGSIVFGWNTGQKDSSNMGKKNNQKFIQIPTARLKSRIEQLCEQYDIKFIETEESYTSKASFLDNDSLPKFGAKPEGWKSSGIRVKRGLFKTSTGIKINADCNGAANIIRKVAMMAKFNLAGIGRGCLSQPKKVLLWTIKKSPA

SEQ ID NO: 5845 - protein, 451 aa, unidentified
MARKKAVKVLRKQKKRENIQRFTQKQNIGRACLTAKEFRLLQRMSHSSKALRNVGLYTIKQSYLNNNKMATVKEVDTAMQADMNYWGIQSNSVQAIRRSLFTEVKSFFKGLEQWKKKPETFAGRPKFPNYSGSTDKRIIEIYQVPKVDDNGYWMIPMNVAFRKKFGSIKIRMPKNVRNKKISYIEIVPKQKGRFFEVHYTYEMHVSQMKKPSTTTSNALSCDLGVDRLLSCVTNTGDAFLIDGKKLKSINQYFNKMIRNLQLKNVENGLSKRVITNKMAALWHKRERQINGYISQTVGLLFKKVKACNIDMVVVGYNTGWKQKSDMGKKNNQKFVQIPFHKLIAAIENKCIKEGIRFLKQEESYTSKASFLDKDKIPVWSKEDRTHYRFSGKRITRGLYQSKSGTCIHADINGALNTLEKSKIVQLDDNLKVKTPILLKVQKRRAFASRIA

SEQ ID NO: 5846 - protein, 404 aa, unidentified
MTHLSKDLYNLTLYTVKQHYELNGTFLPYAKAYHLVKDSEPYKLLPSQVAQQTMKIVERNFRSFFHVLKERKKGNYNRPVRPPKYLPKNGHFVLIFPYQSFRVKEDRIILTLGKNFAEKYGVKHLEIPLPKNVKGHRIKEIRILPRYNALWFEVEYVYEVQQEERDLDRSKYLAIDLGLDNFATCVSTTGTAFIIEGRGLKSFNRWWNKKKAKLQSQYGKQGIKFGKKMAWLLKKRKNVVNDFMNKAVSYIVNYCLENGIGNIVIGELKGVKQNTDLGRRNNQNFHYIPYGLFKQKLKAKCERYGINYIEVDEAYTSKVDALALEPIEKREKYLGKRVRRGLFQSSTGVLINADVNGALNILRKVAGDSPIGGIAGSGRVNRPVRVRLPWGGLTPHEAPSVRAG

SEQ ID NO: 5847 - protein, 404 aa, unidentified
MTHLSKDLYNITLYTIKQHYELNGTFLPYAKAYHLVKDSEPYKLLPSQVAQQTMKIVERNFRSFFHVLKERKKGNYNRPVKPPKYLPKNGHFILIFPYQSFRVKEDRIILTLGKNFAEKYGVKHLEIPLPKNVKGHRIKEIRILPRYNALWFEVEYVYEVLPEERDLDRSKYLAIDLGLDNFATCVSTTGTAFIIEGRGLKSFNRWWNKEKAKLQSQYDKQGIKFGRKMAWLLKKRKNVVNDFMNKAVSYIVNYCLENGIGNVVIGELKGVKQNTDLGRRNNQNFHYIPYGLFKQKLKAKCERYGINYIEVDEAYTSKVDALALEPIEKREKYLGKRVKRGLFQSSAGVLINADVNGALNILRKVAGDSPIGEIAGSGRVNRPVRVRLPWGGLTPHEAPSVRAG

SEQ ID NO: 5848 - protein, 451 aa, unidentified
MARKKAVKVLRKQNKRETMQRFTQKQNIGRACLTAKEFRLLQRMSHSSKALRNVGLYTMKQSYLNHNKMATVKEVDTAMQADMNYSGVQSNSVQAIRRALFTEVKSFFKALEQWKKKTETFTGRPKFPNYSRSTDKRIIEIYQVPKVDDNGYWMIPMNVAFRKKYGSIKIRMPKNLRNKKISYIEIVPKQKGRFFEVHYTYEMHVSQMKKPSTTTSNALSCDLGVDRLLSCVTNTGDAFLIDGKKLKSINQYFNKMIRNLQQKNIENGISKRVVTNKMAALWHKRERQINGYISQTVGLLFKKVKACSVDTVVVGYNAGWKQKSDMGQKNNQKFVQIPFQKLIAAIENKCVKEGIRFFKQEESYTSKASFLDKDPIPVWSKNDRTHYRFSGKRITRGLYQSKSETCIHADINGALNTLQKSRVVQLDDNLKVKTPILLEVQKRKAVASRIA

SEQ ID NO: 5849 - protein, 451 aa, unidentified
MARKKAVKVLRKQKKRETMQRFTQKQNIGRACLTAKEFRLLQHMSHSSKALRNVGLYTIKQSYLNNNKMATVKEVDTAMQADMNYWGVQSNSVQAIRRAVFTEVKSFFKALGQWKKNPEKFTGRPKFPNYSRSTDKRIIEIYQVPKVDDNGYWMIPMNVAFRKKFGSIKIRMPKNIRNKKISYIEIVPKQKGRFFEVHYTYEMHVSQMKKKSTTTSNALSCDLGVDRLLSCVTNTGDTFLIDGKKLKSINQYFNKMIRNLQEKNMDNGISKRVVTNKMATLWNKRERQINGYISQTVGLLFKKVKAFGIDTVVVGYNAGWKQKSDMGKKNNQTFVQIPFHKLMAAIENKCIKEGIRFLKQEESYTSKASFLDKDPVPVWSKDDKMQYLFSGKRITRGLYQSKSGECIHADINGALNTLEKSKVVELEENLKVKTPILLEVQKRKAVASCIA

SEQ ID NO: 5850 - protein, 392 aa, unidentified
MHNCAVYYARQVWFKSHRFVSGFDLVNEMGKNRHFSALSSEAAVQTCLSVGESISSFAKLLSKFKNGELEQRPRIPNYRRSGYQVVSFPRRCLKLVDRQIRLPLGRQTKAWFGLSEFFVPMPSNLDFKKIKELRVLPRNKCFYAEFVYTAEPIETHLDQLHALGLDHGINNWLTGVSTVGTNFIIDGKRLKSINQWYNKQVAKLMTDKPNGFWSNRLALLTEKRNRQMRDAINKAAKLVINHCLKNKIGTIVFGWNQGQKQEVNLGDKNNQSFVQIPTGRLKDRIQQLCSLYGIQLVETEESYTSQSSFLDADEIPVYGEKPDEWKSSGKRIRRGLFQSADGSLINADCNGASNILRKVAVTLGLDLSGISRGVLTTPLKLNLWAIQESQRL

SEQ ID NO: 5851 - protein, 413 aa, unidentified
MKLSFKFKPNISKKQLEIIEELSYHTTKLYNIINYDLRENGAKTYYDIEKEYKSNWHCDFLHSHTRQQMFKVLEQNWKSYFASVEDFRANPSKYKAKPRPPKFKNIDKNKNEIIFTNLAIRYDNGLLKLSLSKTIKSLFNVESLNFVVSKKLQSIINWNSLQQARFNYDKVQKCWYLIVIYNKKELENNKTNICSIDLGLDNIATLTFKYGLNQYIFCGKKLKSINSYTNKQIAHLQSIEMFKYGSDKFKNTKRINKIRRYRNNYINDYMHKVSKSIIDKAIENNVGKIVIGKLKGIKQNMDFNKSFAQIPIQRLAELISYKAKLQGIKVKFQDESYTSGCSALDLEVITKKNYDKSRRIVRGLFLSSYGLINPDINGSLNILRKSEKCIPDLIKLKRDNGKLDSPKRIRVAC

SEQ ID NO: 5852 - protein, 451 aa, unidentified
MTRKKAVKVLRKQKKRENMQRFTQKQNIGRACLTAKEFRLLQRMSHSSKALRNVGLYTMKQSYLNHNRMATVKEVDTAMQADMNYPGVQSNSVQAIRRALFTEVKSFFKAMEQWKKHPEKFTGRPQFPNYSRSTDKRIIEIYQVPKVDENGYWIIPMNVAFRKKFGSIKIRMPKNLRNKNISYIEIVPKQKGRFFEVHYTYEMHVSQMKKPSTTTSNALSCDLGVDRLVSCVTNTGDAFLIDGKKLKSINQYFNKMICNLGQKNMDNGISKRIVTNKMAALWRKRERQINGYIAQTVGLLFKKVKEFDIDTIVIGYNAGWKQKSHMGKKNNQKFVQIPFQKLMAAIENKCVKEGIRFFKQEESYTSKASFFDKDPVPVWSKDDKTQYRFSGKRMTRGLYQSKAGTCIHADINGALNTLKKSGVVELDDNLKVKTPILLEVQKRKAVASRIA

SEQ ID NO: 5853 - protein, 451 aa, unidentified
MARKKAVKVLRKQKKRETMQRFTQKQNIGRACLTAKEFRLLQRMSHSSKALRNVGLYTMKQSYLNHNRMATVKEVDTAMQNDMNYSGIQSNSVQAIRRALFTEGKSFFKALEQWKKNPEKFTGRPKFPNYSRSTDKRIIEIYQVPKVDENGYWMIPMNVAFRKKFGSIKIRMPKNLRNKNISYIEIVPKQKGRFFEVHYTYEMHVSQMKKLSTTTSNALSCDLGVDRLVSCVTNTGDAFLIDGKKLKSINQYFNKMICNLQQKNMDNGIAKRIVTNKIAALWHKRERQINGYIAQTVGLLFKKVKEFDIDTIVIGYNAGWKQKSHMGKKNNQKFVQIPFQKLIAAIENKCVKEGIRFFKQEESYTSKASFLDKDPVPVWSKDDKTQYRFSGKRITRGLYQSKAGTCIHADINGALNILKKSGVVELDDNLKVKTPILLEVKKRKAVTSRIA

SEQ ID NO: 5854 - protein, 451 aa, unidentified
MARKKAVKVLRKQKKRETMQRFTQKQNIGRACLTAKEFRLLQRMSHSSKALRNVGLYTIKQSYLNHNRVATVKEVDNAMQADMNYSGVQSNSVQAIRRALFTEVKSFFKALEQWKKHPDKFTGRPKFPNYSRSTDKRIIEIYQVPKVDENGYWIIPMNVAFRKKFGSIRIRMPKNLRNKNISYIEIVPKQKGRFFEVHYTYEMHVSQMKKQPMTTSNALGCDLGVDRLVSCVTNTGDAFLIDGKKLKSINQYFNKTIRNLQQKNVENGLSKRIVTNKIAALWHKRERQIHGYIAQTVGLLFKKVKEFDIDTIVVGYNAGWKQKSHMGKKNNQTFVQIPFEKLIAAIENKCIKEGIRFFKQEESYTSKASFLDKDPVPVWSKDDRTQYRFSGKRITRGLYQSKAGTCIHADMNGALNTLKKSGIVELDDNLKVKTPILLEVQKRKAVASRIA

SEQ ID NO: 5855 - protein, 451 aa, unidentified
MARKKAVKVLRKQKKRENMQRFTQKQNIGRACLTAKEFRLLQRMAHSSKALRNIGLYTMKQSYLNNNRMATVKEVDAAMQADMNYSGIQSRSVQAIRRSLFTEVKSFFKAMEQWKKNPEKFTGRPKFPNYSRSTDKRMIEIYQVPKVDENGYWMIPMNVAFRKKFGSIQIRMPKNLRNKNISYIEIVPKQKGRFFEVHYTYEMHVSQMKKPPTTTSNALSCDLGVDRLLSCVTNTGDAFLMDGKKLKSINQYFNKMICNLGQKNMDNGISKRIVTNKMAALWHKRERQINGYIAQTVGLLFKKVKEFNLDTIVVGYNAGWKQKSHMGKKNNQKFVQIPFQKLIAAIENKCVKEGIRFFKQEESYTSKASFLDKDPVPVWSKDDKTQYRFSGKRITRGLYQSKAGTCIHADMNGALNTLKKSGVVELDDNLKVKTPILLEVQKRKAVASRIA

SEQ ID NO: 5856 - protein, 451 aa, unidentified
MARKKAVKVLRKQKKRENMQRFTQKQNIGRACLTAKEFRLLQRMAHSSKALRNIGLYTMKQSYLNNNRMATVKEVDAAMQADMNYSGIQSNSVQAIRRSLFTEVKSFFKAMEQWKKNPEKFTGRPKFPNYSRSTDKRMIEIYQVPKVDENGYWMIPMNVAFRKKFGSIQIRMPKNLRNKNISYIEIVPKQKGRFFEVHYTYEMHVSQMKKPPTTTSNTLSCDLGVDRLLSCVTNTGDAFLMDGKKLKSINQYFNKMICNLGQKNMDNGISKRIVTNKMAALWHKRERQINGYIAQTVGLLFKKVKEFNLDTIVVGYNAGWKQKSHMGKKNNQKFVQIPFQKLIAAIENKCVKEGIRFFKQEESYTSKASFLDKDPVPVWSKDDKTQYRFSGKRITRGLYQSKAGTCIHADMNGALNTLKKSGVVELDDNLKVKTPILLEVQKRKAVASRIA

SEQ ID NO: 5857 - protein, 451 aa, unidentified
MARKKVVKVLRKQKKRETMQRFTQKQNIGRACLTAKEFRLLQRMAHSSKALRNVGLYTIKQSYLNDNKMATVKEVDNAMQADMNYSGVQSNSVQAIRRALFTEMKSFFKTLEQWKKHPDKFTGRPKFPNYSRSTDKRIIEIYQVPKVDENGYWMVPMNVAFRKKFGSIKIRMPKNLRNKNISYIEIVPKQKGRFFEVHYTYEMHVSQVKKQPTTTSNALSCDLGVDRLVSCVTNTGYAFLIDGKKLKSINQYFNKTIRNLQLKNMENGLSKRLVTNKIAALWHKRERQINGYIAQTVGLLFKKVKELDIDTIVVGYNAGWKQKSHMGKKNNQTFVQIPFEKLMAAIENKCIKEGIRFFKQEESYTSKASFLDKDPVPVWSKDDKTQYRFSGKRITRGLYQSKAGTCIHADINGALNTLKKSKIVELDDNLKVKTPILLEVQKRKAIASRIA

SEQ ID NO: 5858 - protein, 451 aa, unidentified
MAKKKAVKVLRKQKKRETLRRFTQKQNIGRACLTAQEFRLLQRMSHSSKALRNVGLYTMKQSYLNHNKMATVKEVDTAMQADMNYWGIQSNSVQAIRRALFTEVKSFFKALEQWKKNPEKFTGRPKFPNYSHSTDKRIIEIYQVPKVDENGFWMIPMSVAFRKKFGSIKIRMPKNLRNKNISYIEIVPKQKGRFFEVHYTYEMHVSQMKKQPMTTSNALGCDLGVDRLVSCVTNTGDAFLIDGKKLKSINQYFNKTIRNLQQKNVENELSKRIVTNKIAALWHKRERQIHGYIAQTVGLLFKKVKEFDIDTIVVGYNAGWKQNSHMGKKNNQKFVQIPFHKLIAAIENKCIKEGIRFFKQEESYTSKASFLDKDPVPVWSKDDRTQYRFSGKRITRGLYQSKAGTCIHADINGALNTLKKSGVVELDDNLKVKTPILLEVQKRKAVASRIA

SEQ ID NO: 5859 - protein, 451 aa, unidentified
MAKKKAVKVLRKQKKRETLQRFTQKQNIGRAGLTAKEFRLLQRMSHSSKALRNVGLYTMKQSYLNHNRMATVKEVDTAMQADMNYWGMQSNSVQAIRRALYAEVKSFFKAMEQWKKNPEKFTGRPKFPNYSRSTDKRIIEIYQVPKVDENGYWMIPMNVAFRKKFGSIKIRMPKNIRNKKISYIEIVPKQKGRFFEVHYTYEMHVSQMKQQSTTTSNALSCDLGVDRLVSCVTNTGDAFLIDGKKLKSINQYFNKMICNLQQKNLENGISKRVVTNTMAVLWHKRERQINGYISQTVGLLFKKVKAFGIDTIVVGYNAGWKQKSDMGKKNNQKFVQIPFHKLIAAIENKCIKEGIRFLKQEESYTSKASFLDKDPVPVWSKDDKTHYYFSGKRITRGLYQSKSGKCIHADINGALNTLEKSRVVEWDDNLKVKTPILLEVQKRKVVASRIA

SEQ ID NO: 5860 - protein, 451 aa, unidentified
MARKKAVKVLRKQKKRETMQRFTQKQNIGRACLTAKEFRLLQRMSHSSKALRNVGLYTIKQSYLNHNNIATVKEVDTAMQADMNYWGMQSNSVQAIRRALFTEVKSFFKALEQWKKKPETFTGRPKFPNYSRSTDKRIIEIYQVPKVDDNGYWIIPMNVAFRKKFGSIKIRMPKNLRNKKISYIEIVPKQKGRFFEVHYTYEMHVSQMKKQSTTTSNALSCDLGVDRLVSCVTNTGDAFLMDGKKLKSINQYFNKKIRNLQQKNIENGISKRVVTNKMATLWHKRERQINGYISQTVGLLFKKMKVFNIDTVVVGYNAGWKQKSGMGKKNNQQFVQIPFHKLIVAIENKCVKEGIRFLKQEESYTSKASFLDKDPVPVWSKDDRTHYYFSGKRMTRGLYQSKAGTCIHADINGALNTLEKSRVVQLDENLKVKTPILLEVQKRKAVASRIA

SEQ ID NO: 5861 - protein, 451 aa, unidentified
MARKKAVKVLRKQKKRETMQRFTQKQNIGRACLTAKEFRLLQRMSHSSKALRNVGLYTIKQSYLNHNKMATVKEVDTAMQADLNYSGIQSNSVQAIRRALLTEVKSFFKALEQWKKNPEKFTGRPKFPNYSRSTDKRIIEIYQVPKVDDNGYWMIPMSVAFRKKFGSIKIRMPKNVRNKKISYIEIVPKQKGRFFEVHYTYEMHVSQMKKPSTTTNNALSCDLGVDRLVSCVTNTGDTFLIDGKKLKSINQYFNKMIRNLQQKNIENGLSKRVVTNQMAALWHKRERQINGYISQTVGLLFKKVKECSVDTVVVGYNAGWKQKSDMGKKNNQKFVQIPFHKLIAAIENKCIKEGIRFLKQEESYTSKASFLDKDPVPVWSKGDRTHYRFSGKRMTRGLYQSKAGTCIHADINGALNTLEKSRVIELDENLKVRTPILLEVQKRKAVASRIA

SEQ ID NO: 5862 - protein, 451 aa, unidentified
MARKKAVKVLRKQKKRETMQRFTQKQNIGRACLTAKEFRLLQRMSHSSKALRNVGLYTIKQSYLNHNNIATVKEVDTAMQADMNYWGMQSNSVQAIRRALFTEVKSFFKALEQWKKKPETFTGRPKFPNYSRSTDKRIIEIYQVPKVDDNGYWIIPMNVAFRKKFGSIKIRMPKNLRNKKISYIEIVPKQKGRFFEVHYTYEMHVSQMKKQSTTTSNALSCDLGVDRLVSCVTNTGDAFLMDGKKLKSINQYFNKKIRNLQQKNIENGISKRVVTNKMATLWHKRERQINGYISQTVGLLFKKMKVFNIDTVVVGYNAGWKQKSGMGKKNNQQFVQIPFHKLIVAIENKCVKEGIRFLKQEESYTSKASFLDKDPVPVWSKDDSTHYYFSGKRMTRGLYQSKAGTCIHADINGALNTLEKSRVVQLDENLKVKTPILLEVQKRKAVASRIA

SEQ ID NO: 5863 - protein, 451 aa, unidentified
MARKKAVKVLRKQKKRETMQRSTQKQNIGRACLTAKEFRLLQRMSHSSKALRNVGLYTIKQSYLNHNKMATVKEVDTAMQADLNYSGIQSNSVQAIRRALLTEVKSFFKALEQWKKNPEKFTGRPKFPNYSRSTDKRIIEIYQVPKVDDNGYWMIPMSVAFRKKFGSIKKRMPKNERNKKISYIEIVPKQKGRFFEVHYTYEMHVSQMKKPSTTTNNALSCDLGVDRLVSCVTNTGDTFLIDGKKLKSINQYFNKMIRNLQQKNIENGLSKRVVTNQMAALWHKRERQINGYISQTVGLLFKKVKECSVDTVVVGYNAGWKQKSDMGKKNNQKFVQIPFHKLIAAIENKCIKEGIRFLKQEESYTSKASFLDKDPVPVWSKGDRTHYRFSGKRMTRGLYQSKAGTCIHADINGALNTLEKSRVIELDENLKVRTPILLEVQKRKAVASRIA

SEQ ID NO: 5864 - protein, 431 aa, unidentified
MFGCQQVLIKADKETRAIIEYLGRESNSLYNCSVYYARQIWLKTGKIVTGFDLTKEMKFNPHFKAGYASSMQQTCLNVGESFKSFKKLLKKSIKGELNQKPNVPKYRKSGGLFTVTYPKKWLKLIEGKIRFPLGEQVRAWFGLTEFFLPFPVNLKWELIKEVRIVPRNTCLYAEFVDQQIHCELKEGQSLPTHLDSTKVLGIDHGLNNWLTCVSNIETSFIIDGKHLKSVNQWYNKQIATLKEGKPKGFWSRTLAHVTEKRNQQMRDAVNKAARIVINHCLIHGIGTIVFGWNQGQKNESNMGAKNNQNFVQIPTAKLKDRIVQLGEQYGIKFVETEESYTSKASFLDNDELPKYGEKPDGWQSSGKRIKRGLYRTADNWLVNADCNGGANILRKVKTMLKLDLSRVTRGILTMPIRIRFWSNSVLESASL

SEQ ID NO: 5865 - protein, 451 aa, unidentified
MAKKKAVKVLRKQKKRETLRRFTQKQNIGRTCLTAQEFRLLQRMSHSSKALRNVGLYTMKQSYLNHNKMATVKEVDTAMQADMNYWGIQSNSVQAIRRALFTEVKSFFKALEQWKKNPEKFTGRPKFPNYSHSTDKRIIEIYQVPKVDENGFWMIPMSVAFRKKFGSIKIRMPKNLRNKNISYIEIVPKQKGRFFEVHYTYEMHVSQMKKQPMTTSNALGCDLGVDRLVSCVTNTGDAFLIDGKKLKSINQYFNKTIRNLQQKNVENGLSKRIVTNKIAALWHKRERQIHGYIAQTVGLLFKKVKEFDIDTIVVGYNAGWKQNSHMGKKNNQKFVQIPFHKLIAAIENKCIKEGIRFFKQEESYTSKASFLDKDPVPVWSKDDRTQYRFSGKRITRGLYQSKAGTCIHADINGALNTLQKSQVVELDGNLKVKTPILLEVQKRKAVASRIA

SEQ ID NO: 5866 - protein, 442 aa, unidentified
MAKAKSKTPKKPKVNLGVQQNLIAPNQELKSILEYICGEANKLHNCATYYARQMWFKAHKYVTGFDLGKVLIRNRHFSALSSEAATQICNSVGESISSFAKLRELWLNGELENKPKPPNYRKPGYQLVAYPKRSLKLVDGQIRFPLGLRVNAWFGIKEFFLPMPSNLDFDALREVRILPRNGCFYVEFVYPVVVEKPVLDPAKCLGLDPGLNNWLTGVSNVGTSFIIDGRHLKSVNQWYNKQTAKQTTDKPNGFWSKRLAAATEKRNRQMRDAINKAARLVINHCLDNGIGTLVFGWNKGQKDSIELGKKTNQSFVQIPTARLKARIQQLCELYSIVFEETEESYTSKASFLDSDTLPIYGEKPVGEATLKELGWEPSGKRVKRGLYHTSEGVEINADCNGAANILRKVSVKLGLVLSGISRGELKAPLKFRFWTLQESQRL

SEQ ID NO: 5867 - protein, 451 aa, unidentified
MARKKAVKVLHKQKKRETIQRFTQKQNIGRACLTAKEFRLLQRMSHSSKALRNVGLYTMKQSYLNHSKMATVKEVDTAMQADMNYWGIQSNSVQAIRRALYAEVKSFFKALEQWRKKPETFTGRPKFPHYSRSTDKRIIEIYQVPKVDDNGYWMIPMNVAFRKKFGSIQIRMPKNLRNKKISYIEIVPKQKGRFFEVHYTYEMHVSQMKKQFTTTSNALSCDLGVDRLVSCATNTGDAFLIDGKKLKSINQYFNKMIRNLQQKNIENGLSKRVVTNKMAALWHKREQQINGYISQTVGLLFKKVKEFDIDTIVVGYNTGWKQKSDMGKKNNQKFVQIPFHKLIAAIENKCVKEGIRFLKQEESYTSKASFLDKDPVPVWSKDGKTHYCFSGKRLTRGLYQSKAGTCIHADINGALNTLQKSRVVELDDNLTVKTPILLEVQKRKAVASCIA

SEQ ID NO: 5868 - protein, 489 aa, unidentified
MTKENPSNYKTLQIWIKKGHRMYSYFQECCHSAKNMYNTTNFYIRQVYTGLTQEKELQPLQKEVLDHIHKNIGKMNDTQRLAYQKKLEKEKLKPKEEQKEITCNLFSEPNFEKPYVDYNFLDALFKAMIQNDYRALPTQCSQSIMKGLFQNWKSFFASLKDYKKNPNKYAGPPRIPKYIRSSEKEILYTNQDCIIKNDRFLKFPKTKLQLNIGKLGFTEGKLKQVRVIPKYNEYVVELVIDVPSEQQIIEENARYMSIDLGIDNLATIVTNTGMKPVLVKGKHVKSINQYYNKMKSHFTSILRNGKQTNEGPFTSKRIEKLHQKRYLKIKDVFHKVSHHIVKLAQEEEVCKIVIGQNKSWKQETNMGKRNNQSFCHIPYNLLIQMITYKANAVGIQVVVTEESYTSKASFLDNDFIPTYGENDQNTTFSGKRIERGIYRSANKTLINADVNAAANILRKVIPNAWTNGIEGLGVKQLANVLTPLTLIVR

SEQ ID NO: 5869 - protein, 454 aa, unidentified
MYNTTNFYIRQVYTGLTQEKELQPLQKEVLANIHKNIGKMNDTQLLAYQKKLEKEKLKPKEEQKEITCNLFSEPNFEKPYVDYNFLDALFKAMIQNDYRALPTQCSQSIMKGVFQNWKSFFASLKDYKKNPNKYAGPPRIPKYIRSSEKEILYTNQDCIIKNDRFLKFPKTKLKLNIGKLGFTEGKLKQVRVIPKYNEYVVELVIDVPYEQQMIEENARYMSIDLGIDNLATIVTNTGMKPVLVKGKHVKSINQYYNKMKSHFTSILRNGKQTNEGPFTSKRIEKLHQKRYLKIKDVFHKVSHHIVKLAQEEEVCKIVIGQNKGWKQETNMGKRNNQSFCHIPHNLLIQMITYKANAVGIQVVVTEESYTSKASFLDNDFIPTYGENDQNTTFSGKRIKRGIYRSANKTLIHADVNAAANILRKVIPNAWTNGIEGLGVKQLANVLTPLTLIVR

SEQ ID NO: 5870 - protein, 455 aa, unidentified
MVKTMVKKKAVKVLRKQKKRENIQRFTQKQNIGRACLTAKEFRLLQRMSHSSKALRNVGLYTIKQSYLNHNKMATVKEVDNAMQADMNYWGIQSNSVQAIRRALFTEVKSFFKAWEQWKKNPETFTGRPKFPNYSRSTDKRIIEIYQVPKVDDNGYWMIPMNVAFRKKFGSIKIRMPKNLRNKKISYIEIVPKQKGRFFEVHYTYEMHVSQMKKQPTTISKALSCDLGVDRLLSCVTNTGDTFLIDGKKLKSINQYFNKKIRNLQQKNIENGISKRVVTNRMAALWHKRERQVNGYISQTVGLLFKKVKAFDIDTIVVGYNTGWKQKSDMGKKNNQKFVQIPFHKLIAAIENKCIKEGIRFLKQEESYTSKASFLDKDPIPVWSKDDRAHYRFSGRRITRGLYQSKAGTCIHADINGALNTLEKSRVVELDDNLKVKTPILLEVQKRKAVASRIA

SEQ ID NO: 5871 - protein, 455 aa, unidentified
MVKTMARKKAVKVLRKQKKRENIQRFTQKQNIGRACLTAKEFRLLQRMSHSSKALRNVGLYTIKQSYLNDNKMATVKEVDTAMQADMNYSGIQSNSVQAIRRALFTEVKSFFKALEQWKKKPKTFTGRPKFPNYSRSTDKRIIEIYQVPKLDDNGYWMIPMNVAFRKKFGSIKIRMPKNVRNKKISYIEIVPKQKGRFFEVHYTYEMHVSQMKKQSTTTSNALSCDLGVDRLVSCATNTGDAFLIDGKKLKSINQYFNKMIRNLQLKNTENGLSKRVVTNQMAELWHKRERQINGYISQTVGLLFKKVKACNIDTVVVGYNAGWKQKSDMGKKNNQKFIQIPFHKLIAAIKNKCVKEGIRFFKQEESYTSKASFIDKDPIPVWSKDDRTHYRFSGKRMTRGLYQSKAGTCIHADINGALNTLQKSRVVELDENLKVKTSILLEVQKRKAVASRIA

SEQ ID NO: 5872 - protein, 253 aa, unidentified
MVKTMTKKRAVKVLRKQKKRENMQRFTQKQNIGRACLTAKEFRLLQRMSHSSKALRNVGLYTIKQSYLNNNKMATVKEVDTAMQTDMNYWGIQSNSVQAIRRALFTEVKSFFKAMEQWKKKPETFTGRPKFPNYSRSTDKRIIEIYQVPKVDNNGYWMIPMNVAFRKKFGSIKIRMPKNLRNKKISYIEIVPKQKGRFFEVHYTYEMHVSQMKKQPTTISKALSCDLGVDRLLSCVTNTGDAFLIDGKKIKIH

SEQ ID NO: 5873 - protein, 451 aa, unidentified
MGRKKAVKVLRKQKKRENMQRFTQKQNIGRACLTAKEFRLLQRMSHSSKALRNVGLYTIKQSYLNNNKMATVKEVDTAMQADMNYSGVQSNSVQAIRRALFTEVKSFFKAWEQWKKKPETFTGRPRFPNYSGSTDKRIIEIYQVPKVDDNGYWMIPMNVAFRKKFGSIKIRMPKNVRNKKISYIEIVPKQKGRFFEVHYTYEMHVSQMKKQSTTTSNALSCDLGVDRLVSCATNTGDTFLIDGKKLKSINQYFNKMIRNLQLKNVENGLSKRVVTNKMAALWHKRERQINGYISQTVGFLFKKVKAFSIDTVVVGYNTGWKQKSDMGKKNNQKFVQIPFHKLIAAIENKCVKEGIRFLKQEESYTSKASFLDKDRVPVWSKEDRTHYRFSGKRITRGMYQSKSGKCIHADINGALNTLQKSKVVELDDNLKVKTPILLKVQKRKAVALCIA

SEQ ID NO: 5874 - protein, 451 aa, unidentified
MARKKAVKVLRKQKKRETMQRFTQKQNIGRACLTAKEFRLLQRMSHSSKALRNVGLYTIKQSYLNNNKMATVKEVDTAMQTDMNYWGIQSNSVQAIRRALFTEVKSFFKAMEQWKKKPETFTGRPKFPNYSRSTDKRIIEIYQVPKVDNNGYWMIPMNVAFRKKFGSIKIRMPKNLRNKKISYIEIVPKQKGRFFEVHYTYEMHVSQMKKQPTTISKALSCDLGVDRLLSCVTNTGDAFLIDGKKLKSINQYFNKMIRNQQLKNMENGLSKRVVTNKMAALWHKRERQINGYISQTIGLLFEKVKAFNIDTVVVGYNAGWKQKSDMGKKNNQKFVQIPFHKLIAAIENKCIKEGIRFLKQEESYTSKASFLDKDRVPVWDKDDRTHYRFSGKRITRGLYQSKAGTCIHADINGALNTLEKSKIVQLDDNLKVKTPILLKVQKRRAFASRIA

SEQ ID NO: 5875 - protein, 451 aa, unidentified
MTKKRAVKVLRKQKKRENMQRFTQKQNIGRACLTAKEFRLLQRMSHSSKALRNVGLYTIKQSYLNNNKMATVKEVDTAMQTDMNYWGIQSNSVQAIRRALFTEVKSFFKAMEQWKEKPETFTGRPKFPNYSRSTDKRIIEIYQVPKIDNNGYWMIPMNVAFRKKFGSIKIRMPKNLRNKKISYIEIVPKQKGRFFEVHYTYEMHVSQMKKQPTTISKALSCDLGVDRLLSCVTNTGDAFLIDGKKLKSINQYFNKMIRNLQLKNMENGLSKRVVTNKMAELWHKRERQINGYISQTVGLLFEKVKAFNIDTVVVGYNAGWKQKSDMGKKNNQKFVQIPFHKLIAAIENKCIKEGIRFLKQEESYTSKASFLDKDRVPVWDKDDRTHYRFSGKRITRGLYQSKAGKCIHADINGALNTLEKSRVVELDDNLKVKTPILLEVQKRKAVASCIA

SEQ ID NO: 5876 - protein, 451 aa, unidentified
MVKKKAVKVLRKQKKRENIQRFTQKQNIGRACLTAKEFRLLQRMSHSSKALRNVGLYTIKQSYLNHNKMATVKEVDNAMQADMNYWGIQSNSVQAIRRALFTEVKSFFKAWEQWKKNPETFTGRPKFPNYSRSTDKRIIEIYQVPKVDDNGYWMIPMNVAFRKKFGSIKIRMPKNLRNKKISYIEIVPKQKGRFFEVHYTYEMHVSQMKKQPTTISKALSCDLGVDRLLSCVTNTGDTFLIDGKKLKSINQYFNKKIRNLQQKNIENGISKRVVTNRMAALWHKRERQVNGYISQTVGLLFKKVKAFDIDTIVVGYNTGWKQKSDMGKKNNQKFVQIPFHKLIAAIENKCIKEGIRFLKQEESYTSKASFLDKDPIPVWSKDDRAHYRFSGRRITRGLYQSKAGTCIHADINGALNTLEKSRVVELDDNLKVKTPILLEVQKRKAVASRIA

SEQ ID NO: 5877 - protein, 451 aa, unidentified
MARKRAVKVLRKQKKRETMQRFTQKQNIGRACLTAKEFRLLQRMSHSSKALRNVGLYTIKQSYLNNNKMATVKEVDTAMQTDMNYWGIQSNSVQAIRRALFTEVKSFFKAMEQWKKKPETFTGRPKFPNYSRSTDKRIIEIYQVPKVDNNGYWMIPMNVAFRKKFGSIKIRMPKNLRNKKISYIEIVPKQKGRFFEVHYTYEMHVSQMKKQPTTISKALSCDLGVDRLLSYVTNTGDAFLIDGKKLKSINQYFNKMIRNQQLKNMENGLSKRVVTNKMAALWHKRERQINGYISQTIGLLFEKVKAFNIDTVVVGYNAGWKQKSDMGKKNNQKFVQIPFHKLIAAIENKCIKEGIRFLKQEESYTSKASFLDKDRVPVWDKDDRTHYRFSGKRITRGLYQSKAGTCIHADINGALNTLEKSKIVQLDDNLKVKTPILLKVQKRRAFASRIA

SEQ ID NO: 5878 - protein, 451 aa, unidentified
MARKKAVKVLRKQKKRENMQRFTQKQNIGRACLTAKEFRLLQRMSHSSKALRNVGLYTIKQSYLNNNKMATVKEVDTAMQADMNYSGVQSNSVQAIRRALFTEVKSFFKAWEQWKKKPETFTGRPRFPNYSGSTDKRIIEIYQVPKVDDNGYWMIPMNVAFRKKFGSIKIRMPKNVRNKKISYIEIVPMQKGRFFEVHYTYEMHVSQMKKQSTTTSNALSCDLGVDRLVSCVTNTGDTFLIDGKKLKSINQYFNKMIRNLQLKNVENGLSKRVVTNKMAALWHKRERQINGYISQTVGFLFKKVKAFSIDTVVVGYNTGWKQKSDMGKKNNQKFVQIPFHKLIAAIENKCVKEGIRFLKQEESYTSKASFLDKDRVPVWSKEDRTHYRFSGKRITRGMYQSKSGKCIHADINGALNTLQKSKVVELDDNLKVKTPILLKVQKRKAVALCIA

SEQ ID NO: 5879 - protein, 451 aa, unidentified
MARKKAVKVLRKQKKRENMQRFTQKQNIGRACLTAKEFRLLQRMSHSSKALRNVGLYTIKQSYLNNNKMATVKEVDTAMQADMNYSGVQSNSVQAIRRALFTEVKSFFKAWEQWKKKPETFTGRPRFPNYSGSTDKRIIEIYQVPKVDDNGYWMIPMNVAFRKKFGSIKIRMPKNVRNKKISYIEIVPKQKGRFFEVHYTYEMHVSQMKKQSTTTSNALSCDLGVDRLVSCVTNTGDTFLIDGKKLKSINQYFNKMIRNLQLKNVENGLSKRVVTNKMAALWHKRERQINGYISQTVGFLFKKVKAFSIDTVVVGYNTGWKQKSDMGKKNNQKFVQIPFHKLIAAIENKCVKEGIRFLKQEESYTSKASFLDKDRVPVWSKEDRTHYRFSGKRITRGMYQSKSGKCIHADINGALNTLQKSKVVELDDNLKVKTPILLKVQKRKAVALCIA

SEQ ID NO: 5880 - protein, 265 aa, unidentified
MRLVQRHIIRPDHKYYQYFDQQCYLSKNLYNLSTYRYRQHFFQTGQKLSFNDLYHQVSKTSAYYALPNTKVAKQIIRRIDQSWKGYFQAHKDWSRVDNYLHTVSRRVIDWCLLNSIGTLVIGKNDHWKQSINIGKKNNQQFVSIPHARLIEMLCYKGELMGIKVVVTEESYTSQSSFLDFDTLPSYGEKKPKFSGKRIKRGLYKTSTGKLINADVNGSYNCIRKHLQQEKVKSNAFHSHDLMALPFMPVTYDPLRTHNLNFLQIV

SEQ ID NO: 5881 - protein, 451 aa, unidentified
MTKKRAVKVLRKQKKRENMQRFTQKQNIGRACLTAKEFRLLQRMSHSSKALRNVGLYTIKQSYLNNNKMATVKEVDTAMQTDMNYWGIQSNSVQAIRRALFTEVKSFFKAMEQWKKKPETFTGRPKFPNYSRSTDKRIIEIYQVPKVDNNGYWMIPMNVAFRKKFGSIKIRMPKNVRNKKISYIEIVPKQKGRFFEVHYTYEMHVSQMKKQPTTISKALSCDLGVDRLLSCVTNTGDAFLIDGKKLKSINQYFNKMIRNLQLKNMENGLSKRVVTNKMAALWHKRERQINGYISQTVGLLFEKVKAFNIDTVVVGYNAGWKQKSDMGKKNNQKFVQIPFHKLIAAIENKCIKEGIRFLKQEESYTSKASFLDKDRVPVWDKDDRTHYRFSGKRITRGLYQSKAGKCIHADINGALNTLEKSRVVELDDNLKVKTPILLEVQKRKAVASCIA

SEQ ID NO: 5882 - protein, 451 aa, unidentified
MVKKKAVKVLRKQKKRETMQRFTQKQNIGRACLTAKEFRLLQRMSHSSKALRNVGLYTIKQSYLNNNKMATVKEVDTAMQADMNYSGVQSNSVQAIRRALFTEVKSFFKALEQWKKKPETFTGRPRFPNYSGSTDKRIIEIYQVPKVDDNGYWMIPMNVAFRKKFGSIKIRMPKNVRNKKISYIEIVPKQKGRFFEVHYTYEMHVSQMKKPSTTTSNALSCDLGVDRLLSCVTNTGDTFLIDGKKLKSINQYFNKMIRNLQLKNMENGLSKRVVTNRMAALWHKRERQINGYISQTVGLLFKKVQAFDIDTVVVGYNAGWKQKSDMGKKNNQKFVQIPFHKLIAAIENKCIKEGIRFLKQEESYTSKASFLDKDRVPVWSKDDRTHYRFSGKRITRGLYQSKAGTCIHADINGALNTLGKSRVVELDDNLKVKTPILLEVQTRKAVASRIA

SEQ ID NO: 5883 - protein, 451 aa, unidentified
MTKKRAVKVLRKQKKRENMQRFTQKQNIGRACLTAKEFRLLQRMSHSSKALRNVGLYTIKQSYLNNNKMATVKEVDTAMQTDMNYCGIQSNSVQAIRRALFTEVKSFFKAMEQWKKKPETFTGRPKFPNYSRSTDKRIIEIYQVPKVDNNGYWMIPMNVAFRKKFGSIKIRMPKNLRNKKISYIEIVPKQKGRFFEVHYTYEMHVSQMKKQPTTISKALSCDLGVDRLLSCVTNTGDAFLIDGKKLKSINQYFNKMIRNLQLKNMENGLSKRVVTNKMAALWHKRERQINGYISQTVGLLFEKVKAFNIDTVVVGYNAGWKQKSDMGKKNNQKFVQIPFHKLIAAIENKCIKEGIRFLKQEESYTSKASFLDKDRVPVWDKDDRTHYRFSGKRITRGLYQSKAGKCIHADINGALNTLEKSRVVELDDNLKVKTPILLEVQKRKAVASCIA

SEQ ID NO: 5884 - protein, 451 aa, unidentified
MTKKRAVKVLRKQKKRENMQRFTQKQNIGRACLTAKEFRLLQRMSHSSKALRNVGLYTIKQSYLNNNKMATVKEVDTAMQTDMNYWGIQSNSVQAIRRALFTEVKSFFKAMEQWKKKPETFTGRPKFPNYSRSTEKRIIEIYQVPKVDNNGYWMIPMNVAFRKKFGSIKIRMPKNLRNKKISYIEIVPKQKGRFFEVHYTYEMHVSQMKKQPTTISKALSCDLGVDRLLSCVTNTGDAFLIDGKKLKSINQYFNKMIRNLQLKNMENGLSKRVVTNKMAALWHKRERQINGYISQTVGLLFEKVKAFNIDTVVVGYNAGWKQKSDMGKKNNQKFVQIPFHKLIAAIENKCIKEGIRFLKQEESYTSKASFLDKDRVPVWDKDDRTHYRFSGKRITRGLYQSKAGKCIHADINGALNTLEKSRVVELDDNLKVKTPILLEVQKRKAVASCIA

SEQ ID NO: 5885 - protein, 451 aa, unidentified
MTKKRAVKVLRKQKKRENMQRFTQKQNIGRACLTAKEFRLLQRMSHSSKALRNVGLYTIKQSYLNNNKMATVKEVDTAMQTDMNYWGIQSNSVQAIRRALFTEVKSFFKAMEQWKKKPETFTGRPKFPNYSRSTDKRIIEIYQVPKIDNNGYWMIPMNVAFRKKFGSIKIRMPKNLRNKKISYIEIVPKQKGRFFEVHYTYEMHVSQMKKQPTTISKALSCDLGVDRLLSCVTNTGDAFLIDGKKLKSINQYFNKMIRNLQLKNMENGLSKRVVTNKMAELWHKRERQINGYISQTVGLLFEKVKAFNIDTVVVGYNAGWKQKSDMGKKNNQKFVQIPFHKLIAAIENKCIKEGIRFLKQEESYTSKASFLDKDRVPVWDKDDRTHYRFSGKRITRGLYQSKAGKCIHADINGALNTLEKSRVVELDDNLKVKTPILLEVQKRKAVASCIA

SEQ ID NO: 5886 - protein, 443 aa, unidentified
MYTGLTQEKELQPLQKEVLANIHKNIGKMNDTQLLAYQKKLEKEKLKPKEEQKEITCNLFSEPNFEKPYVDYNFLDALFKAMIQNDYRALPTQCSQSIMKGVFQNWKSFFASLKDYKKNPNKYAGPPRIPKYIRSSEKEILYTNQDCIIKNDRFLKFPKTKLKLNIGKLGFTEGKLKQVRVIPKYNEYVVELVIDVPYEQQMIEENARYMSIDLGIDNLATIVTNTGMKPVLVKGKHVKSINQYYNKMKSHFTSILRNGKQTNEGPFTSKRIEKLHQKRYLKIKDVFHKVSHHIVKLAQEEEVCKIVIGQNKGWKQETNMGKRNNQSFCHIPHNLLIQMITYKANAVGIQVVVTEESYTSKASFLDNDFIPTYGENDQNTTFSGKRIKRGIYRSANKTLIHADVNAAANILRKVIPNAWTNGIEGLGVKQLANVLTPLTLIVR

SEQ ID NO: 5887 - protein, 451 aa, unidentified
MVKKKAVKVLRKQRKRENMQRFTQKQNLGRACLTAKAFRLLQRMSHSSKALRNVGLYTMKQSYLNHNRMATVKEVDTAIQADMNYWGIQSNSVQAIRRALYAEVKSFFKALEQWKKKPEKFTGRPKFPNYSRSTDKRIIEIYQAPKVDENGYWMIPMSVAFRKKFGSIKIRMPKNIRNKKISYIEIVPKQKGRFFEVHYTYEMHVSQMKQPSTTTSNALSCDLGVDRLVSCVTNTGDTFLIDGKKLKSINQYFNKMIRNLQLKNVENGLSKRVVTNKMAALWHKRERQINGYISQTVGLLFKKVKACNIDTVVVGYNVGWKQKSDMGKKNNQTFVQIPFHKLLAAIENKCVKEGIRFFKQEESYTSKASFLDKDPVPVWSKDDRTHYRFSGKRITRGLYKSKSGKCIHADINGALNTLEKSKVVELDESLKVKTPILLEVQKRKAVASRIA

SEQ ID NO: 5888 - protein, 451 aa, unidentified
MARKKAVKVLRKQKKRENIQRFTQKQNIGRACLTAKEFRLLQRMSHSSKALRNVGLYTIKQSYLNHNKMAAVKEVDTAMQADMNYWGMQSNSVQAIRRTLYAEVKSFFKALEQWKRKPETFIGRPKFPNYSRSTDKRIIEIYQVPKVDENGYWMIPMNVAFRKKFGSIKIRMPKNVRHKKISYIEIVPKQKGRFFEVHYTYEMHVSQMKKPSTTTSNALSCDLGVDRLVSCVTNTGDTFLIDGKKLKSINQYFNKMIRNLQLKNMDNGLSKRVVTNRMAALWHKRERQINGYISQTVGLLFKKVKAFGIDTVVVGYNAGWKQKSDMGKKNNQKFVQIPFHKLIAAIENKCIKEGIRFFKQEESYTSKASFLDKDPVPVWSKDDRTHYRFSGKRITRGLYQSKAGTCIHADINGALNTLEKSRVVELDESLKVKTPILLEVQKRKAVASRIA

SEQ ID NO: 5889 - protein, 277 aa, unidentified
MPASGQAASGGRRRLRRAGLRTTPTPAAEQAAELSRTFGCVRLVYNKALEERTRAWYSEQRRVSYVQSSAALTEWKKTGELAFLTEVSSVPLQQALRHLQTAFAHFFAKRAKYPRFKSRKKSRASAEYTRSAFKFRDGQLTLAKMAEPLDIRWSRPLPHGCAWYGRELVVIDRWFPSSKLCGACGTVAARLPLNVRVWTCEHCGAVHDRDVNAARNILAAGLAASAWGDGVRPQRESSRTGRSSVKQEPQRASGARKGPGSPRLIRGAGHSLSRSRR

SEQ ID NO: 5890 - protein, 451 aa, unidentified
MAKKKVVKVLRKQKKRENIQRFTQKQNIGRACLTAKEFRLLQRMSHSSKALRNVGLYTIKQSYLNNNKMATVKEVDTAMQADMNYWGIQSNSVQAIRRALFTEVKSFFKALEQWKKKPETFTGRPKFPNYSRSTDKRIIEIYQVPKVDDNGYWMIPMNVAFRKKFGSIKIRMPKNLRNKKISYIEIVPKQKGRFFEVHYTYEMHVSQMKKQSTTTSNALSCDLGVDRLLSCATNTGDTFLIDGKKLKSINQYFNKMICNLQLKNMENGLSKRVVTNQMAALWHKRERQINGYISQTVGLLFKKVKACSIDTVVVGYNTGWKQKSDMGKKNNQKFVQIPFHKLIAAIENKCVKAGIRFLKQEESYTSKASFLDKDPIPVWSKEDRTHYLFSGKRITRGLYQSKAGTCIHADINGALNTLQKSRVVELDDNLKVKTPILLEVQKRKAVASRIA

SEQ ID NO: 5891 - protein, 451 aa, unidentified
MAKKKVVKVLRKQKKRENIQRFTQKQNIGRACLTAKEFRLLQRMSHSSKALRNVGLYTIKQSYLNNNKMATVKEVDTAMQADMNYWGIQSNSVQAIRRALFTEVKSFFKALEQWKKKPETFTGRPKFPNYSRSTDKRIIEIYQVPKVDDNGYWMIPMNVAFRKKFGSIKIRMPKNLRNKKISYIEIVPKQKGRFFEVHYTYEMHVSQMKKQSTTTSNALSCDLGVDRLLSCATNTGDTFLIDGKKLKSINQYFNKMICNLQLKNMENGLSKRVVTNQMAALWHKRERQINGYISQTVGLLFKKVKACSIDTVVVGYNTGWKQKSDMGKKNNQKFVQIPFHKLIAAIENKCVKAGIRFLKQEESYTSKASFLDKDPIPVWSKEDRTHYLFSGKRITRGLYQSKVGTCIHADINGALNTLQKSRVVELDDNLKVKTPILLEVQKRKAVASRIA

SEQ ID NO: 5892 - protein, 451 aa, unidentified
MTKKRAVKVLRKQKKRENMQRFTQKQNIGRACLTAKEFRLLQRMSHSSKALRNVGLYTIKQSYLNNNKMATVKEVDTAMQTDMNYWGIQSNSVQAIRRALFTEVKSFFKAMEQWKKKPETFTGRPKFPNYSRSTDKRIIEIYQVPKVDNNGYWMIPMNVAFRKKFGSIKIRMPKNLRNKKISYIEIVPKQKGRFFEVHYTYEMHVSQMKKQPTTISKALSCDLGVDRLLSCVTNTGDAFLIDGKKLKSINQYFNKMIRNLQLKNMGNGLSKRVVTNKMAALWHKRERQINGYISQTVGLLFEKVKAFNIDTVVVGYNAGWKQKSDMGKKNNQKFVQIPFHKLIAAIENKCIKEGIRFLKQEESYTSKASFLDKDRVPVWDKDDRKHYRFSGKRITRGLYQSKAGKCIHADINGALNTLEKSRVVELDDNLKVKTPILLEVQKRKAVASCIA

SEQ ID NO: 5893 - protein, 451 aa, unidentified
MTKKRAVKVLRKQKKRENMQRFTQKQNIGRACLTAKEFRLLQRMSHSSKALRNVGLYTIKQSYLNYNKMATVKEVDNAMQADMNYWGIQSNSVQAIRRALFTEVKSFFKAWEQWKKNPETFTGRPKFPNYSRSTDKRIIEIYQVPKVDDNGYWMIPMNVAFRKKFGSIKIRMPKNLRNKKISYIEIVPKQKGRFFEVHYTYEMHVSQMKKQPTTISKALSCDLGVDRLLSCVTNTGDAFLIDGKKLKSINQYFNKMIRNLQLKNMGNGLSKRVVTNKMAALWHKRERQINGYISQTVGLLFEKVKAFNIDTVVVGYNAGWKQKSDMGKKNNQKFVQIPFHKLIAAIENKCIKEGIRFLKQEESYTSKASFLDKDRVPVWDKDDRTHYRFSGKRITRGLYQSKAGKCIHADINGALNTLEKSRVVELDDNLKVKTPILLEVQKRKAVASCIA

SEQ ID NO: 5894 - protein, 451 aa, unidentified
MARKKAVKVLRKQKKRENIQRFTQKQNIGRACLTAKEFRLLQRMSHSSKALRNVGLYTIKQSYLNNNKMATVKEVDTAMQADMNYRGIQSNSVQAIRRSLFTEVKSFFKGLEQWKKKPETFAGRPKFPNYSGSTDKRIIEIYQVPKVDDNGYWMIPMNVAFRKKFGSIKIRMPKNVRNKKISYIEIVPKQKGRFFEVHYTYEMHVSQMKKPSTTTSNALSCDLGVDRLLSCVTNTGDAFLIDGKKLKSINQYFNKMIRNLQLKNVENGLSKRVVTNKMAALWHKRERQINGYISQTVGLLFKKVKACNIDMVVVGYNTGWKQKSDMGKKNNQKFVQIPFHKLIAAIENKCIKEGIRFLKQEESYTSKASFLDKDKIPVWSKEDRTHYRFSGKRITRGLYQSKSGTCIHADINGALNTLEKSKIVQLDDNLKVKTPILLKVQKRRAFASRIA

SEQ ID NO: 5895 - protein, 451 aa, unidentified
MTKKKAVKVLRKQKKRETMQRFTQKQNIGRACLTAKEFRLLQRMSHSSKALRNVGLYTIKQSYLNNNKMATVKEVDTAMQTDMNYWGIQSNSVQAIRRALFTEVKSFFKAMEQWKKKPETFTGRPKFPNYSRSTDKRIIEIYQVPKVDNNGYWMIPMNVVFRKKFGSIKIRMPKNLRNKKISYIEIVPKQKGRFFEVHYTYEMHVSQMKKQPTTISKALSCDLGVDRLLSCVTNTGDAFLIDGKKLKSINQYFNKMIRNLQLKNMENGLSKRVVTNKMAALWHKRERQINGYISQTVGLLFEKVKAFNIDTVVVGYNAGWKQKSDMGKKNNQKFVQIPFHKLIAAIENKCIKEGIRFLKQEESYTSKASFLDKDRVPVWDKDDRTHYRFSGKRITRGLYQSKVGTCIHADINGALNTLEKSKIVQLDDNLKVKTPILLKVQKRRAFASRIA

SEQ ID NO: 5896 - protein, 453 aa, unidentified
MYNTTNFYIRQVYTGLTQEKELQPLQKEVLEHIHKNIGKMNDTQRLAYQKKLEKEKVKPKEEQKEITCNLFSEPNFEKPYVDYNFLDALFKAMIQNDYRALPTQCSQSIMKGLFQNWKSFFASLKDYKKNPNKYAGPPRIPKYIRSSEKEILYTNQDCIIKNDRFLKFPKTKLQLNIGKIGFTEGKLKQVRVIPKYNEYVVELVIDVPSEQQMIEENARYMSIDLGIDNLATIVTNTGMKPVLVKGKHVKSINQYYNKMKSHFTSVLRNGKQTNEGPFTSKRIEKLHQKRYLKIKDVFHKVSHHIVKLAQEEVCKIVIGQNKSWKQETNMGKRNNQTFCHIPHSLLIQMITYKANAVGIQVVVTEESYTSKASFLDNDFIPTYGENDQNTTFSGKRIKRGIYRSANKTLIHADVNAAANILRKVIPNAWTNGIEGLSVKQLANVLTPLTLIVR

SEQ ID NO: 5897 - protein, 453 aa, unidentified
MYNTTNFYIRQVYTGLTQEKELQPLQKEVLEHIHKNIGKMNDTQRLAYQKKLEKEKVKPKEEQKEITCNLFSEPNFEKPYVDYNFLDALFKAMIQNDYRALPTQCSQSIMKGLFQNWKSFFASLKDYKKNPNKYAGPPRIPKYIRSSEKEILYTNQDCIIKNDRFLKFPKTKLQLNIGKIGFTEGKLKQVRVIPKYNEYVVELVIDVPSEQQMIEENARYMSIDLGIDNLATIVTNTGMKPVLVKGKHVKSINQYYNKMKSHFTSVLRNGKQTNEGPFTSKRIEKLHQKRYLKIKDVFHKVSHHIVKLAQEEVCKIVIGQNKSWKQETNMGKRNNQTFCHIPHSLLIQMITYKANAVGIQVVVTEESYTSKASFLDNDFIPTYGENDQNTTFSGKRIERGIYRSANKTLIHADVNAAANILRKVIPNAWTNGIEGLSVKQLANVLTPLTLIVR

SEQ ID NO: 5898 - protein, 451 aa, unidentified
MTKKRAVKVLRKQKKRENMQRFTQKQNIGRACLTAKEFRLLQRMSHSSKALRNVGLYTIKQSYLNNNKMATVKEVDTAMQTDMNYWGIQSNSVQAIRRALFTEVKSFFKAMEQWKKKPETFTGRPKFPNYSRSTDKRIIEIYQVPKVDNNGYWMIPMNVAFRKKFGSIKIRMPKNLRNKKISYIEIVPKQKGRFFEVHYTYEMHVSQMKKQPTTISKALSCDLGVDRLLSCVTNTGDAFLIDGKKLKSINQYFNKMIRNQQLKNMENGLSKRVVTNKMAALWHKRERQINGYISQTIGLLFEKVKAFNIDTVVVGYNAGWKQKSDMGKKNNQKFVQIPFHKLIAAIENKCIKEGIRFLKQEESYTSKASFLDKDRVPVWDKDDRTHYRFSGKRITRGLYQSKAGKCIHADINGALNTLEKSRVVELDDNLKVKTPILLEVQKRKAVASCIA

SEQ ID NO: 5899 - protein, 451 aa, unidentified
MTKKRAVKVLRKQKKRENMQRFTQKQNIGRACLTAKEFRLLQRMSHSSKALRNVGLYTIKQSYLNNNKMATVKEVDTAMQTDMNYWGIQSNSVQAIRRALFTEVKSFFKAMEQWKKKPETFTGRPKFPNYSRSTDKRIIEIYQVPKVDNNGYWMIPMNVAFRKKFGSIKIRMPKNLRNKKISYIEIVPKQKGRFFEVHYTYEMHVSQMKKQPTTISKALSCDLGVDRLLSCVANTGDAFLIDGKKLKSINQYFNKMIRNLQLKNMENGLSKRVVTNKMAALWHKRERQINGYISQTVGLLFEKVKAFNIDNVVVGYNAGWKQKSDMGKKNNQKFVQIPFHKLIAAIENKCIKEGIRFLKQEESYTSKASFLDKDRVPVWDKDDRTHYRFSGKRITRGLYQSKAGKCIHADINGALNTLEKSRVVELDDNLKVKTPILLEVQKRKAVASCIA

SEQ ID NO: 5900 - protein, 472 aa, unidentified
MTKENPSNYKTLQIWIKKGHRMYSYFQECCHNAKNMYNTTNFYIRQVYTGLTQEKELQPLQKEVLDNIHKNIGKMNDIQRLAYQKKLEKEKLKPKEEQKEITCNLFSEPNFEKPYVDYNFLDALFKAMIQNDYRAMPTQCSQSIMKGLFQNWKSFFASLKDYKKNPNKYAGPPRIPKYIRSSEKEILYTNQDCIIKNGRFLKFPKTKLQLNIGKLGFTEGKLKQVRVIPKYNEYVVELVIDVPSEQQMIEENARYMSIDLGIDNLATIVTNTGMKPVLVKGKHVKSINQYYNKMKSHFTSILRNGKQINEGPFTSKRIEKLHQKRYLKIKDVFHKVSHHIVKLAQEEEVCKIVIGQNKSWKQETNMGKRNNQSFCHIPHNLLIQMITYKANAVGIQVVVTEESYTSKASFLDNDFIPTYGENDQNTTLINADVNAAANILRKVIPNAWTNGIEGLGVKQLANVLTPLTLIVR

SEQ ID NO: 5901 - protein, 451 aa, unidentified
MVRKKAMKVLRKQKKREIIQRFTQKQNIGRACLTAKEFRLLQRMSHSSKALRNVGLYTMKQSYLNNKKIATVKEVDTAMQADMNYWCMQSNSVQAIRRALYVEVKSFFKALEKWKKNPEKFTGRPKFPNYSRSTDKRIIEIYQVPKVDDNGYWMIPMNVAFRKKFGSIKIRMPKNLRNKKISYIEIVPKQKGRFFEVHYTYEVHVSQMKKPSTTTSNALSCDLGVDRLVSCVTNTGDAFLIDGKKLKSINQYFNKMVRNLQQKNIENGISKRVVTNKMAALWHKRERQINGYISQTVGLLFKKVKACNIDTVVVGYNAGWKQKSDMGKKNNQKFVQIPFHKLIAAIENKCVKEGIRFLKQEESYTSKASFLDKDSIPVWSKDDGTHYRFSGKRITRGMYQSKSGTCIHADINGALNTLQKSRVVELDENLKVKTPILLEVQKCKAVASCIA

SEQ ID NO: 5902 - protein, 433 aa, unidentified
MQRFTQKQNIGRACLTAKEFRLLQRMSNSSKALRNVGLYTIKQSYLNNNKMATIKEVDIAMQADMNYWGMQSNSVQAIRRALFTEVKSFFKALEKWKKNPEKFTGRPKFPNYSRSTDKRIIEIYQVPKVDDNGYWMIPMNVAFRKKFGSIKIRMPKNLRNKKISYIEIVPKQKGRFFEVHYTYEMHVPQMKKQSTTTSNALSCDLGVDRLVSCVTNTGDTFLIDGKKLKSINQYFNKMIRNLQLKNMENGLSKRVVTNKMAALWHKRERQINGYISQTVGLLFKKVKACNIDTVVVGYNAGWKQKSDMGKKNNQTFVQIPFHKLIAAIENKCVKEGIRFLKQEESYTSKASFLDNEPIPVWSKDERTHYRFSGKRITRGLYQSKTGTCIHADINGALNTLQKSKVVELDDNLKVKTPILLEVQKRKAVASRIA

SEQ ID NO: 5903 - protein, 433 aa, unidentified
MQRFTQKQNIGRACLTAKEFRLLQRMSHSSKALRNVGLYTIKQSYLNNNKMATIKEVDIAMQADMNYWGMQSNSVQAIRRALFTEVKSFFKALEKWKKNPEKFTGRPKFPNYSRSTDKRIIEIYQVPKVDDNGYWMIPMNVAFRKKFGSIKIRMPKNLRNKKISYIEIVPKQKGRFFEVHYTYEMHVPQMKKQSTTTSNALSCDLGVDRLVSCVTNTGDTFLIDGKKLKSINQYFNKMIRNLQLKNMENGLSKRVVTNKMAALWHKRERQINGYISQTVGLLFKKVKACNIDTVVVGYNAGWKQKSDMGKKNNQTFVQIPFHKLIAAIENKCVKEGIRFLKQEESYTSKASFLDNDPIPVWSKDERTHYRFSGKRITRGLYQSKTGTCIHADINGALNTLQKSKVVELDDNLKVKTPILLEVQKRKAVASRIA

SEQ ID NO: 5904 - protein, 489 aa, unidentified
MTKENPSNYKTLQIWIKKGHRMYSYFQECCHNAKNMYNTTNFYIRQVYTGLTQEKELQPLQKEVLDNIHKNIGKMNDIQRLAYQKKLEKEKLKPKEEQKEITCNLFSEPNFEKPYVDYNFLDALFKAMIQNDYRAMPTQCSQSIMKGLFQNWKSFFASLKDYKKNPNKYAGPPRIPKYIRSSEKEILYTNQDCIIKNGRFLKFPKTKLQLNIGKLGFTEGKLKQVRVIPKYNEYVVELVIDVPSEQQMIEENARYMSIDLGIDNLATIVTNTGMKPVLVKGKHVKSINQYYNKMRSHFTSILRNGKQINEGPFTSKRIEKLHQKRYLKIKDVFHKVSHHIVKLAQEEEVCKIVIGQNKSWKQETNMGKRNNQSFCHIPHNLLIQMITYKANAVGIQVVVTEESYTSKASFLDNDFIPTYGENDQNTTFSGKRIKRGIYRSANKTLINADVNAAANILRKVIPNAWTNGIEGLGVKQLANVLTPLTLIVR

SEQ ID NO: 5905 - protein, 451 aa, unidentified
MGRKKAVKVLRKQKKRENMQRFTQKQNIGRACLTAKEFRLLQRMSHSSKALRNVGLYTIKQSYLNNNKMATVKEVDTAMQADMNYSGVQSNSVQAIRRALFTEVKSFFKAWEQWKKKPETFTGRPRFPNYSGSTDKRIIEIYQVPKVDDNGYWMIPMNVAFRKKFGSIKIRMPKNVRNKKISYIEIVPKQKGRFFEVHYTYEMHVSQMKKQSTTTSNALSCDLGVDRLVSCVTNTGDTFLIDGKKLKSINQYFNKMIRNLQLKNVENGLSKRVVTNKMAALWHKRERQINGYISQTVGFLFKKVKAFSIDTVVVGYNTGWKQKSDMGKKNNQKFVQIPFHKLIAAIENKCVKEGIRFLKQEESYTSKASFLDKDRVPVWSKEDRTHYRFSGKRITRGMYQSKSGKCIHADINGALNTLQKSKVVELDDNLKVKTPILLKVQKRKAVALCIA

SEQ ID NO: 5906 - protein, 451 aa, unidentified
MGRKKAVKVLRKQKKRENMQRFTQKQNIGRACLTAKEFRLLQRMSHSSKALRNVGLYTIKQSYLNNNKMATVKEVDTAMQADMNYSGVQSNSVQAIRRALFTEVKSFFKAWEQWKKKPETFTGRPRFPNYSGSTDKRIIEIYQVPKVDDNGYWMIPMNVAFRKKFGSIKIRMPKNVRNKKISYIEIVPKQKGRFFEVHYTYEMHVSQMKKQSTTTSNALSCDLGVDRLVSCVTNTGDTFLIDGKKLKSINQYFNKMIRNLQLKNVENGLSKRVVTNKMAALWHKRERQINGYISQTVGFLFKKVKAFSIDTVVVGYNTGWKQKSDMGKKNNQKFVQIPFHKLIAAIENKCVKEGIRFLKQEESYTSKASFLDKDRVPVWSKEDRTHYRFSGKRITRGMYQSKSGKCIHADINGALNILQKSKVVELDDNLKVKTPILLKVQKRKAVALCIA

SEQ ID NO: 5907 - protein, 451 aa, unidentified
MGRKKAVKVLRKQKKRENMQRFTQKQNIGRACLTAKEFRLLQRMSHSSKALRNVGLYTIKQSYLNNNKMATVKEVDTAMQADMNYSGVQSNSVQAIRRALFTEVKSFFKAWEQWKKKPETFTGRPRFPNYSGSTDKRIIEIYQVPKVDDNGYWMIPMNVAFRKKFGSIKIRMPKNVRNKKISYIEIVPKQKGRFFEVHYTYEMHVSQMKKLSTTTSNALSCDLGVDRLVSCVTNTGDTFLIDGKKLKSINQYFNKMIRNLQLKNVENGLSKRVVTNKMAALWHKRERQINGYISQTVGFLFKKVKAFSIDTVVVGYNTGWKQKSDMGKKNNQKFVQIPFHKLIAAIENKCVKEGIRFLKQEESYTSKASFLDKDRVPVWSKEDRTHYRFSGKRITRGMYQSKSGKCIHADINGALNTLQKSKVVELDDNLKVKTPILLKVQKRKAVALCIA

SEQ ID NO: 5908 - protein, 451 aa, unidentified
MARKKAVKVLRKQKKRENIQRFTQKQNIGRACLTAKEFRLLQRMSHSSKALRNVGLYTIKQSYLNNNKIATVKEVDTAMQADMNYWGIQSNSVQAIRRALFTEVKSFFKALEQWKKKPEKFTGRPKFPNYSRSTDKRIIEIYQVPKVDENGYWMIPMNVAFRKKFGSIKIRMPKNLRNKKISYIEIVPKQKGRFFEVHYTYDMHVSQMKQQSTTTSNALSCDLGVDRLVSCVTNTGDTFLIDGKKLKSINQYFNKMIHNLQQKNVDNGISKRIVTNRMTALWHKRERQINGYISQTVGLLFKKVKACNIDTVVVGYNAGWKQKSDMGKKNNQKFVQIPFHKLIAAIENKCIKEGIRFFKQEESYTSKASFLDKDPVPVWSKDDRTHYRFSGKRITRGLYQSKSGRCIHSDINGALNTLEKSRVVELDESLKVKTPILLEVQKRKAVASRIA

SEQ ID NO: 5909 - protein, 451 aa, unidentified
MARKKAVKVLRKQKKRETMQRFTQKQNIGRACLTAKEFRLLQRMSHSSKALRNVGLYTIKQSYLNNNKMATVKEVDTAMQADMNYWGVQSNSVQAIRRALYAEVKSFFKALEQWKKNPEKFTGRPKFPNYSRSTDKRIIEIYQVPKVDENGYWMIPMNVAFRKKYGSIKICMPKNLRNKKISYIEIVPKQKGRFFEVHYTYEMHVSQMNKPSTTTSNALSCDLGVDRLVSCLTNTGDAFLIDGKKLKSINQYFNKMIRNLQRKNMENGISKRVVTNRMAALWHKRERQINGYISQTVGLLFKKVKECSVDTVVVGYNAGWKQKSDMGKKNNQKFVQIPFHKLIAAIENKCIKEGIRFLKQEESYTSKASFLDKDPVPVWSKDDGTHYRFSGKRITRGLYQSKAGTCIHADINGALNTLQKSRVVELDDNLKVKTPILLEVQKRKAVALCIA

SEQ ID NO: 5910 - protein, 301 aa, unidentified
MRTAYRVRAYPTAEQAAALNRTFGCVRLVWNTVLAWRQARYRAEGVKTSYAQTDRYLTELKRDGGHDFLYEVSSVPLQQALRHQHKAFANFFAGRAKHPRFKIPNPRHLERKAKNLARYQRRMARKQRGSNNRAKARAKVARAHTKVRDARADFLHRTSARLVRDHDLIVLEDLNVRGMVRNRSLARVISDCGWGEFRRQLEYKTQRYGRRLVVIDRWYPSSKTCSACGHLLPALPLSTRHWMCPGCGTRNDRDVNAAKNILAAGRAVSACGADVSHSGSSRMRSAVKQEAQPARAGVPRL

SEQ ID NO: 5911 - protein, 451 aa, unidentified
MARKKAVKVLRKQKKRENIQRFTQKQNIGRACLTAKEFRLLQRMSHSSKALRNVGLYTIKQSYLNNNKMATVKELDTAMQADMNYWGIQSNSVQAIRRSLFTEVKSFFKGLEQWKKKPETFAGRPKFPNYSGSTDKRIIEIYQVPKVDDNGYWMIPMNVAFRKKFGSIKIRMPKNVRNKKISYIEIVPKQKGRFFEVHYTYEMHVSQMKQQSTTTSNALSCDLGVDRLLSCVTNTGDAFLIDGKKLKSINQYFNKMIRNLQLKNVENGLSKRVVTNKMAALWHKRERQINGYISQTVGLLFKKVKACNIDMVVVGYNTGWKQKSDMGKKNNQKFVQIPFHKLIAAIENKCIKEGIRFLKQEESYTSKASFLDKDKIPVWSKEDRTHYRFSGKRITRGLYQSKSGTCIHADINGALNTLQKSRVVELDENLKVKTPILLEVQKRKAVASRIA

SEQ ID NO: 5912 - protein, 451 aa, unidentified
MTKKRAVKVLRKQKKRENMQRFTQKQNIGRACLTAKEFRLLQRMSHSSKALRNVGLYTIKQSYLNNNKMATVKEVDTAMQTDMNYWGIQSNSVQAIRRALFTEVKSFFKAMEQWKKKPETFTGRPKFPNYSRSTDKRIIEIYQVPKVDNNGYWMIPMNVAFRKKFGSIKIRMPKNLRNKKISYIEIVPKQKGRFFEVHYPYEMHVSQMKKQPTTISKALSCDLGVDRLLSCVTNTGDAFLIDGKKLKSINQYFNKMIRNLQLKNMENGLSKRVVTNKMAALWHKRERQINGYISQTVGLLFEKVKAFNIDTVVVGYNAGWKQKSDMGKKNNQKFVQIPFHKLIAAIENKCIKEGIRFLKQEESYTSKASFLDKDRVPVWDKDDRTHYRFSGKRITRGLYQSKAGKCIHADINGALNTLEKSRVVELDDNLKVKTPILLEVQKRKAVASCIA

SEQ ID NO: 5913 - protein, 451 aa, unidentified
MARKKAVKVLRKQKKRENIQRFTQKQNIGRACLTAKEFRLLQRMSHSSKALRNVGLYTIKQSYLNHNKIATVKEVDTAMQADLNYSGIQSNSVQAIRRALFTEVKSFFKAWEQWKKKPETFTGRPKFPNYSGSTDKRIIEIYQVPKVDDNGYWMIPMNVAFRKKFGSIQIRMPKNLRNKKISYIEIVPKQKGRFFEVHYTYEMHVSQMKKPSTTTSNALSCDLGVDRLVSCVTNTGDTFLIDGKKLKSINQYFNKIIRNLQLKNVENGLSKRVVTNKMAALWHKRERQINGYISQTVGLLFKKVKAFGIDTVVVGYNAGWKQKSDMGKKNNQKFVQIPFHKLIAAIENKCIKEGIRFLKQEESYTSKASFLDKDPVPAWSKDDRTHYRFSGKRITRGLYQSKLGKYIHADINGALNTLKKSKVVELDDNLKVKTPILLEVQKRKAVASRIA

SEQ ID NO: 5914 - protein, 451 aa, unidentified
MTKKRAVKVLRKQKKRENMQRFTQKQNIGRACLTAKEFRLLQRMSHSSKALRNVGLYTIKQSYLNNNKMATVKEVDTAMQTDMNYWGIQSNSVQAIRRALFTEVKSFFKAMEQWKKKPETFTGRPKFPNYSRSTDKRIIEIYQVPKIDNNGYWMIPMNVAFRKKFGSIKIRMPKNLRNKKISYIEIVPKQKGRFFEVHYTYEMHVSQMKKQPTTISKALSCDLGVDRLLSCVTNTGDAFLIDGKKLKSINQYFNKMIRNLQLKNMENGLSKRVVTNKMAALWHKRERQINGYISQTVGLLFEKVKAFNIDTVVVGNNAGWKQKSDMGKKNNQKFVQIPFHKLIAAIENKCIKEGIRFLKQEESYTSKASFLDKDRVPVWDKDDRTHYRFSGKRITRGLYRSKAGKCIHADINGALNTLEKSRVVELDDNLKVKTPILLEVQKRKAVASCIA

SEQ ID NO: 5915 - protein, 289 aa, unidentified
MRTAYKVRVYPTAEQAAVLNRTFGCVRLVWNSVLAWRQARYRAEGVTTSYAQTDRYLTELKRDGGHDFLYEVSSVPLQQTLRHQHTAFAPTRAHLERKARNLARYQRRMARKQRGSNNRAKAKAKVAGAHTKVRDARADFLHRTSTRLVRDRDLIVIEDLNVKGMVRNRRLARAISDAGWGEFRRQLEYKTARAGRRLVVIDRWYPSSKTCSACGHLPTALSLSTRHWTCPGCGTRHDRDVNAAKNILAAGRAVSACGADVSPQGSSLRRSAVKQEAQPVRAGIPVLQL

SEQ ID NO: 5916 - protein, 451 aa, unidentified
MVKKKAVKVLRKQKKRENIQRFTQKQNIGRACLTAKEFRLLQRMSHSSKALRNVGLYTIKQSYLNHNKMATVKEVDNAMQADMNYWGIQSNSVQAIRRALFTEVKSFFKAWEQWKKNPETFTGRPKFPNYSRSTDKRIIEIYQVPKVDDNGYWMIPMNVAFRKKFGSIKIRMPKNLRNKKISYIEIVPKQKGRFFEVHYTYEMHVSQMKKQPTTISKALSCDLGVDRLLSCVTNTGDTFLIDGKKLKSVNQYFHKKIRNLQQKNIENGISKRVVTNRMAALWHKRERQVNGYISQTVGLLFKKVKAFDIDTIVVGYNTGWKQKSDMGKKNNQKFVQIPFHKLIAAIENKCIKEGIRFLKQEESYTSKASFLDKDPIPVWSKDDRAHYRFSGRRITRGLYQSKAGTCIHAEINGALNTLEKSRVVELDDNLKVKTPILLEVQKRKAVASRIA

SEQ ID NO: 5917 - protein, 451 aa, unidentified
MVKKKAVKVLRKQKKRENIQRFTQKQNIGRACLTAKEFRLLQRMSHSSKALRNVGLYTIKQSYLNHNKMATVKEVDNAMQADMNYWGIQSNSVQAIRRALFTEVKSFFKAWEQWKKNPETFTGRPKFPNYSRSTDKRIIEIYQVPKVDDNGYWMIPMNVAFRKKFGSIKIRMPKNLRNKKISYIEIVPKQKGRFFEVHYTYEMHVSQMKKQPTTISKALSCDLGVDRLLSCVTNTGDTFLIDGKKLKSINQYFNKKIRNLQQKNTENGISKRVVTNRMAALWHKRERQVNGYISQTVGLLFKKVKAFDIDTIVVGYNTGWKQKSDMGKKNNQKFVQIPFHKLIAAIENKCIKEGIRFLKQEESYTSKASFLDKDPIPVWSKDDRAHYHFSGRRITRGLYQSKAGTCIHADINGALNTLEKSRVVELDDNLKVKTPILLEVQKRKAVASRIA

SEQ ID NO: 5918 - protein, 279 aa, unidentified
MARKSVKRAFRYRFYPSDAQAAELSRTFGCVRLVYNRALAERTAAWNAEQRWLSYTDSSAALTAWKRTQELSFLTEVSSVPLQQTLRHLHTAFRNFFDRRAKYPRFKSKKTSRASAEYTRSAFGYRDGRLTLAKMAEPLDIVWSRPLPEGARPSTVTVSRDVAWRELRSMLEYKCAWYGRDLVLVDRFCFSSKLCSTPGCGYLNASLPLRVREWTCPGCGVAHDRDVNAALNLEAAGLAVVACGAGVRPQRESSRTGRPAVKQEGHGATRDEALASNHR

SEQ ID NO: 5919 - protein, 451 aa, unidentified
MARKKAVKVLRKQKKRETMQRFTQKQNIGRACLTAKEFRLLQRMSHSSKALRNVGLYTIKQSYLNNNKMATVKEVDTAMQTDMNYWGIQSNSVQAIRRALFTEVKSFFKAMEQWKKKPETFTGRPKFPNYSRSTDKRIIEIYQVPKVDNNGYWMIPMNVAFRKKFGSIKIRMPKNVRNKKISYIEIVPKQKGRFFEVHYTYEMHVSQMKKQPTTISKALSCDLGVDRLLSCVTNTGDAFLIDGKKLKSINQYFNKMIRNLQLKNMENGLSKRVVTNKMAALWHKRERQINGYISQTVGLLFEKVKAFNIDTVVVGYNAGWKQKSDMGKKNNQKFVQIPFHKLIAAIENKCIKEGIRFLKQEESYTSKASFLDKDRVPVWDKDDRTHYRFSGKRITRGLYQSKAGTCIHADINGALNTLEKSKIVQLDDNLKVKTPILLKVQKRRAFASRIA

SEQ ID NO: 5920 - protein, 451 aa, unidentified
MARKKAVKVLRKQKKRENIQRFTQKQNIGRACLTAKEFRLLQRMSHSSKALRNVGLYTIKQSYLNNNKMATVKEVDTAMQADMNYWGIQSNSVQAIRRSLFTEVKSFFKGLEQWKKKPETFAGRPKFPNYSGSTDKRIIEIYQVSKVDDNGYWMIPMNVAFRKKFGSIKILIPKNVRNKKISYIEIVPKQKGRFFEVHYTYEMHVSQMKKPSTTTSNALSCDLGVDRLLSCVTNTGDAFLIDGKKLKSINQYFNKMIRNLQLKNVENGLSKRVVTNKMAALWHKRERQINGYISQTVGLLFKKVKACNIDMVVVGYNTGWKQKSDIGKKNNQKFVQIPFHKLIAAIENKCIKAGIRFLKQEESYTSKASFLDKDKIPVWSKEDRTHYRFSGKRITRGLYQSKSGTCIHADINGALNTLQKSRVVELDDNLKVKTPILLEVQKRKAVASRIA

SEQ ID NO: 5921 - protein, 451 aa, unidentified
MVKKKAVKVLRKQKKRENMQRFTQKQNLGRACLTAKAFRLLQRMSHSSKALRNVGLYTMKQSYLNHNRMATVKEVDTAMQADMNYWGIQSNSVQAIRRALYAEVKSFFKALEQWKKKPEKFTGRPKFPNYSRSTDKRIIEIYQAPKVDENGYWMIPMSVAFRKKFGSIKIRMPKNIRNKKISYIEIVPKQKGRFFEVHYTYEMHVSQMKQPSTTTSNALSCDLGVDRLVSCVTNTGDTFLIDGKKLKSINQYFNKMIRNLQLKNVENGLSKRVVTNKMAALWHKRERQINGYISQTVGLLFKKVKACNIDTVVVGYNVGWKQKSDMGKKNNQTFVQIPFHKLLAAIENKCVKEGIRFFKQEESYTSKASFLDKDPVPVWSKDDRTHYRFSGKRITRGLYKSKSGKCIHADINGALNTLEKSKVVELDESLKVKTPILLEVQKRKAVASRIA

SEQ ID NO: 5922 - protein, 475 aa, unidentified
WIKKGHRMYSYFQECCHNAKNMYNTTNFYIRQVYTGLTQEKELQPLQKEVLDHIHKNIGKMNDTQRLAYQKKLEKEKLKPKEEQKEITCNLFSEPNFEKPYVDYNFLDALFKAMIQNDYRALPTQCSQSIMKGLFQNWKSFFASLKDYKKNPNKYAGPPRIPKYIRSSEKEILYTNQDCIIKNDRFLKFPKTKLQLNIGKLGFTEGKLKQVRVIPKYNEYVVELVIDVPSEQQMIEENARYMSIDLGIDNLATIVTNTGMKPVLVKGKHIKSINQYYNKMKSHFTSILRNGKQTNEGPFTSKRIEKLHQKRYLKIKDVFHKVSHHIVKLAQEEEVCKIVIGQNKSWKQETNMGKRNNQSFCHIPHNLLIQMITYKANAVGIQVVVTEESYTSKASFLDNDFIPTYGENDQNTTFSGKRIKRGIYRSANKTLIHADVNAAANILRKVIPNAWTNGIEGLGVKQLANVLTPLTLIVR

SEQ ID NO: 5923 - protein, 451 aa, unidentified
MARKKAVKVLRKQKKRETMQRFTQKQNIGRACLTAKEFRLLQRMSHSSKALRNVGLYTIKQSYLNHNKMATVKEVDTAMQADINYWGMQSNSVQAIRRALFTEVKSFFKALEQWKKKPETFTGRPKFPNYSRSTDKRIIEIYQVPKVDDNGYWMIPMNVAFRKKFGSIKIRMPKNIRNKKISYIEIVPKQKGRFFEVHYTYEMHVSQMKKPSTTTSNALSCDLGVDRLVSCVTNTGDTFLIDGKKLKSINQYFNKTIRNLQRKNIGNGLSKRVVTNQMAAVWHKRERQINGYISQTVGLLFKKVKAFSIDTVVVGYNAGWKQKSDMGKKNNQTFVQIPFHKLIAAIENKCVKEGIRFLKQEESYTSKASFLDKDPIPVWSKDDRTHYRFSGKRITRGLYQSKAGTCIHADINGALNTLEKSKVVELDDNLKVKMPILLEVQKRKAVASRIA

SEQ ID NO: 5924 - protein, 226 aa, unidentified
MEKAYSYRFYPTPEQESLLRRTLGCVRLVYNQALHERTQAWYERQERVGYSQTSSMLTNWKKQEDLDFLNQVSCVPLQQGLRHLQTAFTNFFAGRAKYPNFKKKHQGGSAEFTKSAFKFKNGQIYLAKCLEPLAYKCRWYGRNYIEIDRWFPSSKRCSNCGHIVEKMPLNIREWDCPNCGTHHDRDLNASKNILAAGLAVSDCGASVRPEQSKSVKATAKKQKPKL

SEQ ID NO: 5925 - protein, 451 aa, unidentified
MARKKAVKVLRKQKKRENIQRFTQKQNIGRACLTAKEFRLLQRMSHSSKALRNVGLYTIKQSYLNNNKMATVKELDTAMQADMNYWGIQSNSVQAIRRSLFTEVKSFFKGLEQWKKKPETFAGRPKFPNYSGSTDKRIIEIYQVPKVDDNGYWMIPMNVAFRKKFGSIKIRMPKNVRNKKISYIEIVPKQKGRFFEVHYTYEMHVSQMKKQPTTISKALSCDLGVDRLLSCVTNTGDAFLIDGKKLKSINQYFNKMIRNLQLKNMENGLSKRVVTNKMAALWHKRERQINGYISQTVGLLFEKVKACNIDIVVVGYNAGWKQKSDMGKKNNQKFVQIPFHKLIAAIENKCIKEGIRFLKQEESYTSKASFLDKDRVPVWDKDDRTHYRFSGKRITRGLYQSKAGTCIHADINGALNTLEKSKIVQLDDNLKVKTPILLKVQKRRAFASRIA

SEQ ID NO: 5926 - protein, 489 aa, unidentified
MAKENPSNYKTLQIWIKKGHRMYSYFQECCHNAKNMYNTTNFYIRQVYTGLTQEKELQPLQKEVLDHIHKNIGKMNDTQRLAYQKKLEKEKLKPKEEQKELTCNLFSEPNFEKPYVDYNFLDALFKAMIQNDYRALPTQCSQSIMKGVFQNWKSFFASLKDYKKNPNKYAGTPRIPKYIRSSEKEILYTNQDCVIKNGRFLKFPKTKLQLNIGKLGFTEGKLKQVRVIPKYNEYVVELVIDVPSEQQMIEENARYMSIDLGIDNLATIVTNTGMKPVLVKGKHVKSINQYYNKMKSHFTSILRNGKQTNEGPFTSKRIEKLHQKRYLKIKDVFHKVSHHIVKLAQEEDVCKIVIGQNKSWKQETNMGKRNNQSFCHIPHSLLIQMITYKANAVGIQVVVTEESYTSKASFLDNDFIPTYGENDQNTTFSGKRIKRGIYCSANKTLINADVNAAANILRKVIPNAWTNGIEGLGVKQLANVLTPLTLIVR

SEQ ID NO: 5927 - DNA, 11 bp, synthetic construct
  source 1..11: mol_type = other DNA
taattattgac

SEQ ID NO: 5928 - DNA, 8215 bp, synthetic construct
  source 1..8215: mol_type = other DNA
attcaccaccctgaattgactctcttccgggcgctatcatgccataccgcgaaaggttttgcgccattcgatggtgtccgggattgacagctagctcagtcctaggtataatgctagcgtggagatatacctcgagattataatttttgagggtgattgtacacccgtaaggtgaggttgattacgaacactcactaaatgtaaacaacatatacaacggcttacttatcgttctttcaccaatatataatagcaggatactcccaacatgaaggcaggataaaggcaacatagtgacagtagaatgtatgttaaatattttgtagtcctgtgatcgagaatttttttatttaaaaagacaattcgaagatttttaaaaaaaacttggctacaactcctacgttaactttggaaatgaatttaaataaatgaattttgaacattataaaaattttgtttgtctatgtttaaccttgattgggtaaataatagaaattcaaatcttaaaacactataattttgagggtgattgtaaactcgtaaggtgaggttggtaacgaacacttactaaatgtaaattacatatacaacgcgtgagctaacctacttttgtcaatagctaaatgacagaatgttttttttatattaaaagcaagataatgagaacgtatatttgtctgaaactagtattttggaattggagtttggtttacaaaaaagtgaatttgaatgttggaaaaacatttttcatctgtatatattcaacttaaaataagaaatttaatagaggtttaatcctcaaaacactttaattttcttccgctaatttctccccacattaaagagttttggacggatacaagaaaacataactttcgttatcctttctttggctatgatgatagccaatttattaaaaattgttttatacttccctcttcataagcgaaacgattgagaatgatggattttccaaacaaaaatcaataaaaaggcagctaaggtagaaaggactcccacactccagccagccaaaagcttacggcataatgaaacagaaaaattgtgaaataaagtttatttttctgtttcacccttcgggacttaatccgtttccttctggctctgcaataccctttccgtttatctgctttctttttttcctttttcttttggaaaatataatttttttaagaagacttttggattgtttataagctgtcggattcaaaatttatttgtgttccaaaacaatctgtctccacttctttttcttgtaaaattgcggcgcaagaaaaagaagcaaaaagaacaccgctctttatgtattggttaatttatttcgatacgcttgtacatatgtacatacatatagaaaaatgcttttatgtaaaagcatataagtgtaacaacatactaacgtaattatctgcatacctatttaattacttatctccttacatatttaaaagtctatttacataaataaatatgtaattaattgaaaatgtatttattatgcgtggcagcatctggaattgaaaggttgaatttgtctgcattttcgataacaacactcttaaaaacaaggttttactttgtaaataattcgttcgcactaattgatactaatatgaaaaaatatagaaacatatgatgttttgaaaaaagcaagcgggagttgggcagagccctactcgcttgcctctttactgcgttacagaggattttcgtataccagaggtatacttttgagcatttaagctctatattatcacgaaaatggtatatcaccaggtatacataaagaaaagatgaattggatttagaaaattaagaagctcctcgaggcggccgctttgttttaaaaaaaagtgttcgctatagcgaatagttaaaaattattattatatttgtataagcgaattgataattagacttttaatagtcataattaaacgatgtaatctcgactcaaaacgaccaattttctatcgagagtatcgtggaatcgctccatgtctcaaaagttttgtactttcgcatacggcatgggcggttttcacatatgctttaggtagaagcttaaatttatttaagtagggtttggtcgcccttgagtctaaagtgtgaagccgccttgctttttttgcaagaaattcttcatatacgaaaaacatcgttccataaaacccaatacaaaatgagaacgaaacaatttccattcctccgtaaaaaaccgccagacaaagtctgttcgtttttccttttcttttaaagaacaaacctctgttttataacatttaacggatcgtaaagcaaaggggtgtcctttctttacacgccctctatcagagcctcggtaatgagactttgacaagtaggttatactctttttttctcacattaaaagtaaaccctttattgccattttccaaatttattggggttctgctacctactttaagttgtaagcaatgagtatagttgaaatgactaaaattcattttaagttatgaaaacctaaaaacttgcaataaatcaaaactattatagtaaaacccattattgcggccgcaataatagactagcataaccccttggggcctctaaacgggtcttgaggggttttttgctgaacgtacgttttacggctagctcagtcctaggtactatgctagcgtggagatatacggtaccaaggaggtaaataatgggagactacaaagaccatgacggtgattataaagatcatgacatcgattacaaggatgacgatgacaagggaggatccggcagcatgatggaaaaatcaactctaatattaacacgcaagatccaactcatcgtagacctgccgacccaggaggagcgccaggaggttctggagatcttatataaatggcgtaaccgttgctatagagcggcaaatctgatcgttagccacctgtacattcaagctatggttaaagaatttctgtacctgtctgagggcgtcatccacaaattagtcgacgaaaagaaagacgaggccggcattttgcaacgtagccgcattaataccacctaccgcgtgatcagcgatcgtttcaaaggcgagatcccgatgaatattttgagctgtctgaatagccgtctccaaagcacctttaacaaggactatcaggaatactggcgcggtgaagcgagcctgaaaaactttaagcgcgacatggcatttccgttcggcctggagggtattagcaaactgtcctaccatccagaaaagaagtccttttgttttcgtttgttccagctaccattcaaaacgtacctgggtcgtgatttcaccggtaataagaagttgctggagcaggttattaacgatgaggtgaagctttgcactagccagattaaaatcgaaaagggcaaaattttttggctggcggtggtggaaatcgaaaaagaaaatcatcagctgcaaccggaaaagatcgcggaagcgagcctgtccctggagtacccgctggttgttaaggtgggtaagagtcgtctgtccattggtacgaaagaggagttcctgtaccgccgtctcgcgattcaagcgtctcgtaaacgtatgcaggcgggcgttagctatgctaaatctggtaagggtcgtacccgtaagttgaaggctctggaaaagatgagcgaactggagcgcaactatgtccacaaccgtttgcacgtgtattcgcgtcgtctcatcgacttctgcattaacaacaaggcgggcacgcttatcttgctggatcaggaagagaagatggaattggccaaagaggaagagttcgtgctgcgtaactggtcgtactatgaactgatgaccaaaatcaaatacaaagctgataaagccggtattgagttgatcatcgcataaggctccggaagaaggagatatacatatgttggagaaagaatttgaattactaaagaagggcaactcgacggctctggaacgcatttatgtgcgttataacaagcgcatcttctggtttggcaaacagctgatcaaggacgagttcgtggtggaatgcttgctgcaggacgtatttctgaagctgtgggaatatcgtgaaaagatcgagagcccggatcatattttcttcttcctgcgctttgtgatgaaatacagctgttacagccactacgcaaaaccgaaaaacaaattctttcgtaatgttaatagcattgaaaactacgagaactaccagtcctacctggcgggttatgacccggcagatgttattgagaacctgaatgagcaggagcgtcagcaacactattttaacgagatcatcaaggtgctgccactgttgtccaccgaacgtaaacacctgatcgagctttgcttgaagtacggctttcagtataaggcgattgcgcatgttatgggtcgtggtattaccgaaacctcaaatgagatcaagtctgcgatcgaagacctgaaaaaaatcctgagccatcaggataaactcatcattaaaaccaaaaccattagcactgaggagaagcaagagaagatgaccaagacgcagagcttgatcctgaaattaagatgcgagcacaaacaatcctttgccaatattgccgaagaactgcaattgagccagaaagaagttcacaacgagttcatcgctgcgtataagttcacccaacaaaacaaggtccaatctcttaattactaagtccttaagccaaggagacgtaccatggaaaaaaataactataagtcaaatctaaacaagaaattatgcgagtatattaccattcgttttttgtctaactttgataatatttccaataacaacagccagaataagtacgcaaaagctgtgggtgtcaccagcagcaccatcagcaagatctccaagggtgacggctataacatcccgctgagcacgatcgcgctgattctgaaatacgagaaaatctcgctggaagatttcttcaaagacttcaacaagtacgttaatgaataataagaattcctgctgccaccgctgagcaataactagcataaccccttggggcctctaaacgggtcttgaggggttttttgctgaaacctcaggcatttgagaagcacacggtcacactgcttccggtagtcaataaaccggtaaaccagcaatagacataagcggctatttaacgaccctgccctgaaccgacgaccgggtcatcgtggccggatcttgcggcccctcggcttgaacgaattgttagacattatttgccgactaccttggtgatctcgcctttcacgtagtggacaaattcttccaactgatctgcgcgcgaggccaagcgatcttcttcttgtccaagataagcctgtctagcttcaagtatgacgggctgatactgggccggcaggcgctccattgcccagtcggcagcgacatccttcggcgcgattttgccggttactgcgctgtaccaaatgcgggacaacgtaagcactacatttcgctcatcgccagcccagtcgggcggcgagttccatagcgttaaggtttcatttagcgcctcaaatagatcctgttcaggaaccggatcaaagagttcctccgccgctggacctaccaaggcaacgctatgttctcttgcttttgtcagcaagatagccagatcaatgtcgatcgtggctggctcgaagatacctgcaagaatgtcattgcgctgccattctccaaattgcagttcgcgcttagctggataacgccacggaatgatgtcgtcgtgcacaacaatggtgacttctacagcgcggagaatctcgctctctccaggggaagccgaagtttccaaaaggtcgttgatcaaagctcgccgcgttgtttcatcaagccttacggtcaccgtaaccagcaaatcaatatcactgtgtggcttcaggccgccatccactgcggagccgtacaaatgtacggccagcaacgtcggttcgagatggcgctcgatgacgccaactacctctgatagttgagtcgatacttcggcgatcaccgcttccctcatactcttcctttttcaatattattgaagcatttatcagggttattgtctcatgagcggatacatatttgaatgtatttagaaaaataaacaaatagctagctcactcggtcgctacgctccgggcgtgagactgcggcgggcgctgcggacacatacaaagttacccacagattccgtggataagcaggggactaacatgtgaggcaaaacagcagggccgcgccggtggcgtttttccataggctccgccctcctgccagagttcacataaacagacgcttttccggtgcatctgtgggagccgtgaggctcaaccatgaatctgacagtacgggcgaaacccgacaggacttaaagatccccaccgtttccggcgggtcgctccctcttgcgctctcctgttccgaccctgccgtttaccggatacctgttccgcctttctcccttacgggaagtgtggcgctttctcatagctcacacactggtatctcggctcggtgtaggtcgttcgctccaagctgggctgtaagcaagaactccccgttcagcccgactgctgcgccttatccggtaactgttcacttgagtccaacccggaaaagcacggtaaaacgccactggcagcagccattggtaactgggagttcgcagaggatttgtttagctaaacacgcggttgctcttgaagtgtgcgccaaagtccggctacactggaaggacagatttggttgctgtgctctgcgaaagccagttaccacggttaagcagttccccaactgacttaaccttcgatcaaaccacctccccaggtggttttttcgtttacagggcaaaagattacgcgcagaaaaaaaggatctcaagaagatcctttgatcttttctactgaaccgctctagatttcagtgcaatttatctcttcaaatgtagcacctgaagtcagccccatacgatataagttgtaattctcatgttagtcatgccccgcgcccaccggaaggagctgactgggttgaaggctctcaagggcatcggtcgagatcccggtgcctaatgagtgagctaacttacattaattgcgttgcgctcactgcccgctttccagtcgggaaacctgtcgtgccagctgcattaatgaatcggccaacgcgcggggagaggcggtttgcgtattgggcgccagggtggtttttcttttcaccagtgagacgggcaacagctgattgcccttcaccgcctggccctgagagagttgcagcaagcggtccacgctggtttgccccagcaggcgaaaatcctgtttgatggtggttaacggcgggatataacatgagctgtcttcggtatcgtcgtatcccactaccgagatgtccgcaccaacgcgcagcccggactcggtaatggcgcgcattgcgcccagcgccatctgatcgttggcaaccagcatcgcagtgggaacgatgccctcattcagcatttgcatggtttgttgaaaaccggacatggcactccagtcgccttcccgttccgctatcggctgaatttgattgcgagtgagatatttatgccagccagccagacgcagacgcgccgagacagaacttaatgggcccgctaacagcgcgatttgctggtgacccaatgcgaccagatgctccacgcccagtcgcgtaccgtcttcatgggagaaaataatactgttgatgggtgtctggtcagagacatcaagaaataacgccggaacattagtgcaggcagcttccacagcaatggcatcctggtcatccagcggatagttaatgatcagcccactgacgcgttgcgcgagaagattgtgcaccgccgctttacaggcttcgacgccgcttcgttctaccatcgacaccaccacgctggcacccagttgatcggcgcgagatttaatcgccgcgacaatttgcgacggcgcgtgcagggccagactggaggtggcaacgccaatcagcaacgactgtttgcccgccagttgttgtgccacgcggttgggaatgtaattcagctccgccatcgccgcttccactttttcccgcgttttcgcagaaacgtggctggcctggttcaccacgcgggaaacggtctgataagagacaccggcatactctgcgacatcgtataacgttactggtttcac

SEQ ID NO: 5929 - DNA, 9798 bp, synthetic construct
  source 1..9798: mol_type = other DNA
attcaccaccctgaattgactctcttccgggcgctatcatgccataccgcgaaaggttttgcgccattcgatggtgtccgggattgacagctagctcagtcctaggtataatgctagcgtggagatataccccgggtaaacaatatattaaggatacatttacacccgtaaggtgaggttgttggtacatactcacggaatgcacaaagcatatacagctagaaatattaattaaaaaaaaggctaaccttaaagaaaaagaagtacaattaataactagtttaatcgtgatcaataacaaagcacagcagattactgatatgataattggaaaaatgaaactgttgtgaataataatatttgagggtgcctgtacacccgtaaggtgaggtggttgatacatactcactgaatgcataaggcatatacaacaaatataacaattaaaaactcaccctaaagcaaaggaagtacaattaatagctagtttaattgtaatcaataacaaagcacagcagattactgatatgattattggaaaaatgaaactgttgtgaataataatatttgagggtgcctgtacacccgtaaggtgaggtggttgatacatactcactgaatgcataaggcatatacaacaaatataacaattaaaaactcaccctaaagcaaaggaagtacaattaatagctagtttaattgtaatcaataacaaagcacagcagattactgatatgattattggaaaaatgaaactgttgtgaataataatatttgagggtgcctgtacacccgtaaggtgaggtggttgatacatactcactgaatgcataaggcatatacagcaaagataacaattaaaaactcaccctaaagcgaaggaagtacaattaatagctagtttaattgtaatcaataacaaagcacagcagattactgaagtgattcttggacaaaagcagaacctgttgtgagtaataatattagagggtgcctatacacccgtaaggtgaggttgttggcaaacaatcaatgaatgcgtacggcagatataacagagaatatttagagtttattaatggaaagcttttgtcaagtatatgtagctccgtagtggttcaaaacaacaatagttagtgtatacttaattacgaagctatattgaaatacagtatgtatagggatataatattttgagagtggttgtacacctatatagtgaggttgcgggtaaaaagtcactgaatgcagtaagaatataaaactctgaaaaaacttataaaaataaataagaacctttaaaagccttacaaatacatttttcacagaaatagttaaagtgtttaaaaatagttaattataacgttctgcgttttctaaattaataattattattatttttgaaataacttaccaacataattattaactccccggggcggccgctttgctgtattatatatagcaaattgcattttaaaaataaaatatttattggattataatccaatattaaaataattgtatatatttgctattcaattacagcatagttgtaattttgcaatactttatatagaaaatatcaagctattgcttagagtctcgtcattgaaaactggtaatttttagacacacgagatgataagtagattagctcacgaccatggcgtgagctcacttatctgtgtgtgggtataccagtacctcaatggcggatatgttgagtttcacgccttttttgctttttactcaaccttttgccggttatggtgctgtgtacaggcactaattattgtttgtttagtcgtttagtcgtggataccgagggtcgggacgagatttgttaatcgttgattcgtttatttgtttaattgttgattccgatgggcgtgacgagatatgtttaatcgtttaaatgttgatattgagattgggacaggttgtgtaattatctgtacatccccctgccccccttcaaagggggaatcttttgaaggttgattttgagattgggacgagatttgtcgaattgttaaatcgtagaaccgtttaatcgtttagtcattgatgccgtgaacgggacaagatatgtttaattgtttgtcgaatcgtagaaccgtttaattgtttaattaacctagttcagtcgctgcgctcgagtgttgattttgagattgggaaaagttgtgcaattattagtacatccccctggctcccttcaaagggggaatcgtttgaaggttgattttgagatcgggacgcaatgtggtaaatcgtttagtcgtttagttgtgtaatcgtttaatcgtagaactgttactgagttctttcggtgtataattttaacaggatttaattaaaaataggtgcagttattttaggacgggtcaccgaaagattttcggaatatcaactgcggggatactaagtagatagtgtatggatactgtatggatagtgcatgaaacacattttcggagaaataagtaaaaaacagtggtttattctaaatttttaaatttagatagaaaataaggaaaatttaaaaaagtgaaaaatggtgtttttagaagtttagacaggtaaatataacgaataaaaaacaaacggaggaaataccgtttttaaaattggtttttgaactataaatgcaatttgttcttgaggaaaaattttattcattaaacctaattcagaaatcttttttcttttgaccgcaaaccgtaaggttcacggcttccaagctgtaaaataatgctttggacgtaaaagaaacaaaactcttgagcgtcactactcgtggtcaattaacgcctcaatagcgaaatcaaataaacttgctttttcaaagcttcggacaacatttgattttacgctattttcatcgaatcgacgctcactgcgttgtgaatgctcagttttagattgtagttaatagaattattggatttttgattgaaaacggaatagactaagtaggagaatcgaagcgccattatcagtgaaacgagcgttgacaagttgaagtgagcgcaaaatcataagggagcgaagtgacgtttttatgatttagcttacaaaacgtagtcgaccgttttaatgatacggcaagataaaaaaaaagatttttgcttcttttcatcggaaaagaagagaaaaatcgaaatatatcaatcaggaacaatggggattgtgagttgaaagagagctttttattaccaaagcgtacgcttctcctcttaatatcaaatgttcaagatgacagattaaacgaaaaattgtagtaagataaaacaaaacaaaaatgtaaaatatatgaagataaatcttacagctaaaaaacaattacaacatacaaaaagttagctgcgtaagtcatgggcaaagcacataacagcttctaaaccataatagattaaatgttaatatagttagttaagtgaagtagttaaagcccctgggagcgttatgtgccgaagctctgaattattatagggaatgccgataagagaatcagcttactgtcaccccttgcctgacaaggggtctcacaagaagcttaaaaaaacaaacgcagttttatttttttttcttttggtcgcaaaagaaacaaaactcctgagcgtcactactcgtggtcgattaacgatttaatagcgaaatcaaataaacttgctttttcaaagcttcggacaacatttgattttacgctattttcatcgaatcgacgctcactgcgttgtgaatgctcagttttagattgtagtaatttgtattattggatttttgattgaaaacggaatatactaagtagcagaatcgaagcgtcattatcgttaaaacgagtgtcaattgattgaagaatacgtaaaagaatcgggtagctttgctacgattcgattctttagcattcaaaatttagattgaccgttttaatgatacggcaagataaagaaaaagagatttttgcttcttttcatccgaaaagaagaagaattaagaaacaaattgtaattgtaaaaaccgaattatttgttagaaactaaattaaaaagtttatacctacaaggtttttaaaaccttgcaggagagaaaacacaacttgtataatataaaaccccactattatgccacaaaaaaactttgaattactaaaaaaaaaagcgaccctgcagcattagaaaaaattcatgccctatacaacagacggatcttttggataggcagaaggataatagctgatgattatgaggtggaaaacctggtacaggatacttttctaaaactatgggattgtcgcgaaaaaatacaagacccagcggccgcaataatagactagcataaccccttggggcctctaaacgggtcttgaggggttttttgctgaacgtacgttttacggctagctcagtcctaggtactatgctagcgtggagatatacggtaccaaggaggtaaataatgggagactacaaagaccatgacggtgattataaagatcatgacatcgattacaaggatgacgatgacaagggaggatccggcagcatgtcaaaaactacaataaagctaacgaggaagattgagttaaatatcgatctgccgaccaaagaacagcgtaaagaggtttgggaaaagctgtaccgctggcaaaacatttactgccgcgcagctaacttgaccatgagccacctgtacgtccaggcaatgattaaggactttctgtacctgactgagggcatcaagtacaaactcgcggatgagaagaaggacccgaacggtatgttacaatgtagccatagctcttcgatctatcgtatgctgtcgcaacgtttcaaaggggaagtgccgaccaagatcctgaaccacgcgaactatgagctgatgaataagtttaagaaaaactatatggattatgtcaatggcaagcgctccttggacaattttaaaagcaacaccgtattcccattcggtatcgaaggctttaaaagattcaagtacaatgaagagattaaagcgttctccttccgtctctactctgttccgttcaagacctttctgggtcgcggtttcaccgagaagtacaaattgctgcagcagctgctaagcggtgaggtgaagctgtgtcggtctcgtattaagctggagaaaggcaagatctactggctcgcggtttttgagatcccgatcgaggtccactgcctgaagccggatgtggttgctgaagcgagtctgagcttggaatacccgatcagcgtgaaagtgggccgtaaacgcctggacatcggcaataaagaagaatttcttcaccgtcgtctggccattcaagccgcgtatacccgtacccgtgagtccgtgaagtattgccgtggtggtcacggcaaaaaacgcaaactgaaagcgctggatcgttttaaaaacttggaagcaaattatgtttccaaccgtctgcatgaatacagccgccgactgatcgatttctgcattaagcatcaggcgggcaccctggtgctgttggacatgcaagaaaacacggacatcgctaaagaggaacagttcgttctgcgtaactggagctattatgagttgattaacaagatcaaatacaaagccgaaaaagcgggtattgagttgattacgacataaggctccggaagaaggagatatacatatggtacaagatacatttttaaaactatgggactgtcgtgaaaagattcaggacccgatgcatattttgttttttttacagtatgttattaagaagtcctgcctgagccactacaataaaccacgtaacaaattcttccgcaaagttggctccttggagagctatgaaaactttcagaattatctggcgggttacgacccggcagatgttgtcgagaacttgaaagatcaagaaagccagcagaagatgtttgatctcgtcacctccgtgctgccgctgatcaagccggagagaaagcacctgatcaacctttgcctgaagtacggctttcgttacaaacacatcgcccaagtgatgggtaaaagcaccaaacaaacggtggacgaggtgaatcgcgcgatcgaggacattaaaaagattgttgcagttcgtaaccgcaacgagaagaagttcaaaccggagctggagcagaaagctgtgagcgaacgtcagagccaagtactgaagctgcgttgcgaaaaaaaattctcgttcgccgcgattgcggaacagctgaatctgtctcaaaagcaggttcatgaagaatttatggcggcgtataagttcgctcaacaacataaactgcagtctttgtaagtccttaagccaaggagacgtaccatggatattacaaaagacttacaaatactaatcggcaagcagttgcacgacatccgcattaaaaacaagcaaacccagaatgatatcgcgtttctgactggtattgataccgcagatgttagcaagcacgagaagggtaagaagaacctgaccttaaaaaccctgatgaaattcgctaccgcgttgaatattcatccgaaagagctgttcaactttgacttcgacatcaaccgttataaaacggaatactaataagaattcctgctgccaccgctgagcaataactagcataaccccttggggcctctaaacgggtcttgaggggttttttgctgaaacctcaggcatttgagaagcacacggtcacactgcttccggtagtcaataaaccggtaaaccagcaatagacataagcggctatttaacgaccctgccctgaaccgacgaccgggtcatcgtggccggatcttgcggcccctcggcttgaacgaattgttagacattatttgccgactaccttggtgatctcgcctttcacgtagtggacaaattcttccaactgatctgcgcgcgaggccaagcgatcttcttcttgtccaagataagcctgtctagcttcaagtatgacgggctgatactgggccggcaggcgctccattgcccagtcggcagcgacatccttcggcgcgattttgccggttactgcgctgtaccaaatgcgggacaacgtaagcactacatttcgctcatcgccagcccagtcgggcggcgagttccatagcgttaaggtttcatttagcgcctcaaatagatcctgttcaggaaccggatcaaagagttcctccgccgctggacctaccaaggcaacgctatgttctcttgcttttgtcagcaagatagccagatcaatgtcgatcgtggctggctcgaagatacctgcaagaatgtcattgcgctgccattctccaaattgcagttcgcgcttagctggataacgccacggaatgatgtcgtcgtgcacaacaatggtgacttctacagcgcggagaatctcgctctctccaggggaagccgaagtttccaaaaggtcgttgatcaaagctcgccgcgttgtttcatcaagccttacggtcaccgtaaccagcaaatcaatatcactgtgtggcttcaggccgccatccactgcggagccgtacaaatgtacggccagcaacgtcggttcgagatggcgctcgatgacgccaactacctctgatagttgagtcgatacttcggcgatcaccgcttccctcatactcttcctttttcaatattattgaagcatttatcagggttattgtctcatgagcggatacatatttgaatgtatttagaaaaataaacaaatagctagctcactcggtcgctacgctccgggcgtgagactgcggcgggcgctgcggacacatacaaagttacccacagattccgtggataagcaggggactaacatgtgaggcaaaacagcagggccgcgccggtggcgtttttccataggctccgccctcctgccagagttcacataaacagacgcttttccggtgcatctgtgggagccgtgaggctcaaccatgaatctgacagtacgggcgaaacccgacaggacttaaagatccccaccgtttccggcgggtcgctccctcttgcgctctcctgttccgaccctgccgtttaccggatacctgttccgcctttctcccttacgggaagtgtggcgctttctcatagctcacacactggtatctcggctcggtgtaggtcgttcgctccaagctgggctgtaagcaagaactccccgttcagcccgactgctgcgccttatccggtaactgttcacttgagtccaacccggaaaagcacggtaaaacgccactggcagcagccattggtaactgggagttcgcagaggatttgtttagctaaacacgcggttgctcttgaagtgtgcgccaaagtccggctacactggaaggacagatttggttgctgtgctctgcgaaagccagttaccacggttaagcagttccccaactgacttaaccttcgatcaaaccacctccccaggtggttttttcgtttacagggcaaaagattacgcgcagaaaaaaaggatctcaagaagatcctttgatcttttctactgaaccgctctagatttcagtgcaatttatctcttcaaatgtagcacctgaagtcagccccatacgatataagttgtaattctcatgttagtcatgccccgcgcccaccggaaggagctgactgggttgaaggctctcaagggcatcggtcgagatcccggtgcctaatgagtgagctaacttacattaattgcgttgcgctcactgcccgctttccagtcgggaaacctgtcgtgccagctgcattaatgaatcggccaacgcgcggggagaggcggtttgcgtattgggcgccagggtggtttttcttttcaccagtgagacgggcaacagctgattgcccttcaccgcctggccctgagagagttgcagcaagcggtccacgctggtttgccccagcaggcgaaaatcctgtttgatggtggttaacggcgggatataacatgagctgtcttcggtatcgtcgtatcccactaccgagatgtccgcaccaacgcgcagcccggactcggtaatggcgcgcattgcgcccagcgccatctgatcgttggcaaccagcatcgcagtgggaacgatgccctcattcagcatttgcatggtttgttgaaaaccggacatggcactccagtcgccttcccgttccgctatcggctgaatttgattgcgagtgagatatttatgccagccagccagacgcagacgcgccgagacagaacttaatgggcccgctaacagcgcgatttgctggtgacccaatgcgaccagatgctccacgcccagtcgcgtaccgtcttcatgggagaaaataatactgttgatgggtgtctggtcagagacatcaagaaataacgccggaacattagtgcaggcagcttccacagcaatggcatcctggtcatccagcggatagttaatgatcagcccactgacgcgttgcgcgagaagattgtgcaccgccgctttacaggcttcgacgccgcttcgttctaccatcgacaccaccacgctggcacccagttgatcggcgcgagatttaatcgccgcgacaatttgcgacggcgcgtgcagggccagactggaggtggcaacgccaatcagcaacgactgtttgcccgccagttgttgtgccacgcggttgggaatgtaattcagctccgccatcgccgcttccactttttcccgcgttttcgcagaaacgtggctggcctggttcaccacgcgggaaacggtctgataagagacaccggcatactctgcgacatcgtataacgttactggtttcac

SEQ ID NO: 5930 - DNA, 6842 bp, synthetic construct
  source 1..6842: mol_type = other DNA
attcaccaccctgaattgactctcttccgggcgctatcatgccataccgcgaaaggttttgcgccattcgatggtgtccgggattgacagctagctcagtcctaggtataatgctagcgtggagatatacctcgagcaattagattttgagggtgcttgtacacccatagggtgaggttaagaattacactcactaagtgtgaacaacacatacaacttgtgggatatacgctaacaatagcaatcaataagcctaaatacgggcacctaaatacaatatgggacaaacaccgataaagtttttttgaacgattgaaaatggatacttttaatgaagtgtccagaaatcgtcaaatattagatagaacccttgggatattgcttctccttataggtatcgcaattgggattttccttattcctgattttttaccactacttaaaaggactccttatttattgctcgaacccgatgcaggtgtaagacatgagcttggatacgcttggtttatgcaatcaattggttggatcattgcttttttcgcatttaggagcagtagggcatttttaagggatagcaagaaaccaactagtaccagtaattaaatcaaaggtgaaagaggtatatagttgcctaaacaccatatacaactcactgaaaaaccgctccgaaacgcaatattctgtgatgacagccattcatccggtaggctaaagtatgtaaaaagaagctaatgtcatcttcccttttctcctcgaggcggccgcaaatgaaaaaattacaagaagtttttttgagagcgttcgctctcatttaggggtttttattatatttatccctgaaataacatatttgcgaaacttgttaagttaataatattagaagcattcgctttgattctcgcatcaaaaactggtaatttttaacgacgagatgataagtgcaaatgctcacggcccgggcgtgagcttacttattgtcgtgcggtataccagtaccttgatgctataggttaagttttcacgccctctttatcttatttaaaaagggctttctcaacttttcaaagctatcttctctttatccttttttaagaaatcgcatcagctttaaaagcataatcaattttaaccatggtgcattgaccatcttaaacgaggcctgttgcggccgcaataatagactagcataaccccttggggcctctaaacgggtcttgaggggttttttgctgaacgtacgttttacggctagctcagtcctaggtactatgctagcgtggagatatacggtaccaaggaggtaaataatgggagactacaaagaccatgacggtgattataaagatcatgacatcgattacaaggatgacgatgacaagggaggatccggcagcatgggaaaatcaacactaaagcacactaggaagattcagatcttgatcgacctgccgacgaaagacgagaagaaagaggttatggatatgatgtatcagtggcgtgatcgttgcttccgcgcagcgaacattatcgtgacccatctgtacgttcaggagatgatcaaggacttcttttatctgagcgaaggtattaagtacaaactcgcggatgagaaaaaagacgaaaagggcatcctgcaacgtagccgtatgaacaccacctatcgcgtggtgagcgaccgttttaagggcgagatgccgacgaatatcctttccaccctgaaccacggcctgatcagcagctttaacaaaaaccgcgtccagtattggaaaggcgaacgtagcctgccaaatttcaaaaaggacatggcattcccgtttggtctgcaaggtatctctcgtctggtgtatgatgaagaaaaaaaggcgttctgctttagattgtaccgcgttccgtttaaaacgtacttgggtaaggacttcaccgataaacgcatgctgctggagcgcctagtcaaaggagacgttaagctgtgtgcgtcgaacattcaactgaatggtggtaagatcttttggctggctgtattcgaaattgaaaaggagaagcacagcctcaaaccggaagtgattgccgaagcttcgctctccttggagtatccgattgttgtgaagactggtaagaaccgtctgaccattggtactaaagaagagttcctgtaccgcagattggcgattcaagcggcgcgtcgtcgtacccaggttggtgcaacctacagccgttctggtaagggtaagaagcgcaaattaaaagccgtcgataaataccataaaacggaatcaaactatgtggcgcatcgtattcacgtttacagccgtaagttaatcgatttctgcattaaacaccaagcgggcaccctgatccttatgaatcaggaggacaaagttggcatcgccaaagaggaggagttcgtgctgcgtaattggtcctattacgaactgatgaccaaaatcaagtacaaagctgagaaggctggcatcgaattgattatcggctaaggctccggaagaaggagatatacatatgttatattcagattttgaattgctaaaaattggcgacactagtgcgttggaccatatccatgcaaaatactttcgttccatcctgtggatcggccgtcagtggctgaacgatgattttttgatcgagtctctggttcaggatacgtttctaaagctgtgggttaatagagataagctggaaagcccggaacacattttttacttcttgcgtttcgtgatgaagcgcgagtgcattagctattaccgtaaaccaaaatacaaatttcataaaaaagtgaacagcttggaggattacgacaactatcaggactatatggtgggttatgatccggttaacgactctgagaacctggacgaacaagaaagcacccagaaatccttcgaccacattaaatcgattcttccgctgctgaatgcggataagcgccatctgatcgagttatgtctgaagtacggtttccaatataaggcgatcagcaaagttatgggtaaaggtattcacgaaaccagccgtgaaatcaaagaagccatcgaggacatcaagaccattgtccacaagggcaacgagctcggcagcaatgacaccatgaccaatgaaatcaagtttagcggtgaattatccgaggaacaggctaaggtgctgaagatgcgctgcgatttgaagtacagcttctctgagattgccaaggagctggaactgtccgagaaagaggtacaccaagagttcatgaaggcatataaactgatgaaagcgaaccaccagttgcaactgcaaagcgcgtaagtccttaagccaaggagacgtaccatgctaatggctgataagaacacaaataaatcgaaggtctatttcagcgataaatacgtgtgcaagttcatcagcgaagagtggctgaccagcaaggacacctccgcgcgtaaatacggtaaaatctacggcgtgaactaccatgttattgaaaagatccagcaagagaatggttataacattccgctgagcaccctgtctacgatttgttttaaccacggcatcaaattgtccgacttctttaaattggttgagaagaagtacggtgaatttctgaatgatagctatgagtataaataataagaattcctgctgccaccgctgagcaataactagcataaccccttggggcctctaaacgggtcttgaggggttttttgctgaaacctcaggcatttgagaagcacacggtcacactgcttccggtagtcaataaaccggtaaaccagcaatagacataagcggctatttaacgaccctgccctgaaccgacgaccgggtcatcgtggccggatcttgcggcccctcggcttgaacgaattgttagacattatttgccgactaccttggtgatctcgcctttcacgtagtggacaaattcttccaactgatctgcgcgcgaggccaagcgatcttcttcttgtccaagataagcctgtctagcttcaagtatgacgggctgatactgggccggcaggcgctccattgcccagtcggcagcgacatccttcggcgcgattttgccggttactgcgctgtaccaaatgcgggacaacgtaagcactacatttcgctcatcgccagcccagtcgggcggcgagttccatagcgttaaggtttcatttagcgcctcaaatagatcctgttcaggaaccggatcaaagagttcctccgccgctggacctaccaaggcaacgctatgttctcttgcttttgtcagcaagatagccagatcaatgtcgatcgtggctggctcgaagatacctgcaagaatgtcattgcgctgccattctccaaattgcagttcgcgcttagctggataacgccacggaatgatgtcgtcgtgcacaacaatggtgacttctacagcgcggagaatctcgctctctccaggggaagccgaagtttccaaaaggtcgttgatcaaagctcgccgcgttgtttcatcaagccttacggtcaccgtaaccagcaaatcaatatcactgtgtggcttcaggccgccatccactgcggagccgtacaaatgtacggccagcaacgtcggttcgagatggcgctcgatgacgccaactacctctgatagttgagtcgatacttcggcgatcaccgcttccctcatactcttcctttttcaatattattgaagcatttatcagggttattgtctcatgagcggatacatatttgaatgtatttagaaaaataaacaaatagctagctcactcggtcgctacgctccgggcgtgagactgcggcgggcgctgcggacacatacaaagttacccacagattccgtggataagcaggggactaacatgtgaggcaaaacagcagggccgcgccggtggcgtttttccataggctccgccctcctgccagagttcacataaacagacgcttttccggtgcatctgtgggagccgtgaggctcaaccatgaatctgacagtacgggcgaaacccgacaggacttaaagatccccaccgtttccggcgggtcgctccctcttgcgctctcctgttccgaccctgccgtttaccggatacctgttccgcctttctcccttacgggaagtgtggcgctttctcatagctcacacactggtatctcggctcggtgtaggtcgttcgctccaagctgggctgtaagcaagaactccccgttcagcccgactgctgcgccttatccggtaactgttcacttgagtccaacccggaaaagcacggtaaaacgccactggcagcagccattggtaactgggagttcgcagaggatttgtttagctaaacacgcggttgctcttgaagtgtgcgccaaagtccggctacactggaaggacagatttggttgctgtgctctgcgaaagccagttaccacggttaagcagttccccaactgacttaaccttcgatcaaaccacctccccaggtggttttttcgtttacagggcaaaagattacgcgcagaaaaaaaggatctcaagaagatcctttgatcttttctactgaaccgctctagatttcagtgcaatttatctcttcaaatgtagcacctgaagtcagccccatacgatataagttgtaattctcatgttagtcatgccccgcgcccaccggaaggagctgactgggttgaaggctctcaagggcatcggtcgagatcccggtgcctaatgagtgagctaacttacattaattgcgttgcgctcactgcccgctttccagtcgggaaacctgtcgtgccagctgcattaatgaatcggccaacgcgcggggagaggcggtttgcgtattgggcgccagggtggtttttcttttcaccagtgagacgggcaacagctgattgcccttcaccgcctggccctgagagagttgcagcaagcggtccacgctggtttgccccagcaggcgaaaatcctgtttgatggtggttaacggcgggatataacatgagctgtcttcggtatcgtcgtatcccactaccgagatgtccgcaccaacgcgcagcccggactcggtaatggcgcgcattgcgcccagcgccatctgatcgttggcaaccagcatcgcagtgggaacgatgccctcattcagcatttgcatggtttgttgaaaaccggacatggcactccagtcgccttcccgttccgctatcggctgaatttgattgcgagtgagatatttatgccagccagccagacgcagacgcgccgagacagaacttaatgggcccgctaacagcgcgatttgctggtgacccaatgcgaccagatgctccacgcccagtcgcgtaccgtcttcatgggagaaaataatactgttgatgggtgtctggtcagagacatcaagaaataacgccggaacattagtgcaggcagcttccacagcaatggcatcctggtcatccagcggatagttaatgatcagcccactgacgcgttgcgcgagaagattgtgcaccgccgctttacaggcttcgacgccgcttcgttctaccatcgacaccaccacgctggcacccagttgatcggcgcgagatttaatcgccgcgacaatttgcgacggcgcgtgcagggccagactggaggtggcaacgccaatcagcaacgactgtttgcccgccagttgttgtgccacgcggttgggaatgtaattcagctccgccatcgccgcttccactttttcccgcgttttcgcagaaacgtggctggcctggttcaccacgcgggaaacggtctgataagagacaccggcatactctgcgacatcgtataacgttactggtttcac

SEQ ID NO: 5931 - DNA, 6375 bp, synthetic construct
  source 1..6375: mol_type = other DNA
attcaccaccctgaattgactctcttccgggcgctatcatgccataccgcgaaaggttttgcgccattcgatggtgtccgggattgacagctagctcagtcctaggtataatgctagcgtggagatatacctcgagatagaatggtcgagggtgcttgtacacccgtaaggtgaggtcaagacactcactaaatgcagactgcatgtacaacgcgtgggctctcttattatttgtaatctttagtttaagcttttaaattactaccttttatactgatagtacgctggcttttttccgttcagtttgtcattcagcgttggcaaagacatactcttttgcaatttttggcttgtgtgttggctgtagcgaattgcaaatgtgtatggctctcctcgaggcggccgcaacttaaagatatcgataaatttctttcgctttcccctttttggtaaaatacaggctcatactggtaatttacaatcggtaatggtgggttacacctttcaacacgactaatttaagcgaaaatttcagcttggaaaaattccaaactaaagaataaggcttcatcaacaccaaggagtgcaaaagaacaaacacgcggccgcaataatagactagcataaccccttggggcctctaaacgggtcttgaggggttttttgctgaacgtacgttttacggctagctcagtcctaggtactatgctagcgtggagatatacggtaccaaggaggtaaataatgggagactacaaagaccatgacggtgattataaagatcatgacatcgattacaaggatgacgatgacaagggaggatccggcagcatggaaaagactacattaaaactaacgaggaagatccaactgttaatcgacctgtctaccaaagaggagaaaaaggaggcactggacaaactgtaccagtggcaaaaccgctgcttccgtgcggcaaatctgattgttacgcatctgtacgtacaggagatgattcgcgagttcttttatctgagtgaaggtaagaagtataaactggcggatgaaaagaaggacgagcagggtattctcaaccgtagccgtattaataccacctaccgcgtggtaagcgatagattcaagggtgaaatcccgaccaacattttgtctaacctgaaccaggcgctgatcagcagctttaaaaagaaccgtccagaatactggaatggtgaacgctccttgaagaacttcagacgtgatatggcatttccgttcgacttggaaggcatgtccggtcttcactataacgaagagaaaaaagcgttctgtttccggttgtttcgcatcccgtttaaaacttacctgggcaaggacttcaccgataaacgtaccctgttagagcgcgttgttgaaggtaaaacgaagctttgcacgagccatattaaactgaaggagggtaagatttttctgctggcggtttttgaaatcgagaaggagaatcacgatttgcgcccggagatcatcgccgaagcttccctgtcgttggagtacccgattgtggttaaggtcggcaaggcgcgtttgaccattggcaccaaagaagagttcctgtaccgccgtcttgcgatccaaagcgcccaccgtcgcgctaaaatcggcgcaacctatagcaaatcgggtaaaggcattaaacgtaaattgaaggctgtggatcgtctgggccagaccgaacgtaaatacgtgcatcataggttgcacgtttattctcgtcgtctgatcgacttttgcgtgaaacaccgcgctggaacgctgattctgctgaaccaagaagagaaaactgaaatcgcgaaggaggagggtttcgtgctccgtaattggagctattgtgatctgatgaccaaaatcgagtacaaggccaagaaggcgggtctggagctaattatcgactaaggctccggaagaaggagatatacatatggaaaatcatcacacactagaggaatgttacaaaggcctgaagaaaggctgcagcaattccttcactgagatccacaccaaatacaatcgccagatcttttggctgggtaaaagctttctcgacgacggctttgtagttgaaaccttggttcaggatgtttttttgaagctttgggttcatcgtgataccctggagtctccgaagcacatctatttcttcctgcgtttcgtgatgaagcgcgagtgcatttcttactacacgcgtccgaagaaccgcttcttccgcaaagtccacagcttggagtccttcgagaactaccaggactacatggtgggttatgatccggcagaggacaacaataacgtgaaactgcaggagggtgaacaagagaaatttgagtcgattaagagcgtcctgccactgctggacgacagcaaacgtcatgttattaacctgtgcctgaagtacggcttccaatataaagcgatttccaaggctatgggtaagggcatcaacgaaacctgtcgtgaaatcaaggaggcgatcgaagatattaagaccattctgcatcaaggtaataaattggactttggtgacaacaacaccgatgagatcaagttcacgggtgaaatgaccgaggaacagaccaaggtgctgaagatgcgttgtgaactgcgttatagcttcagcgaaatcgcggatgaattgaatatttctcagaaagaggtgcaccaagaatttatgatcgcgtatcgtctgatggaagccaaacaccagctgcaaagcgcataagtccttaagccaaggagacgtaccatgactacagatacgaaaacaaatcacataggccgtaaaatcgcgcgtattcgcgaattgcgcggtatgaaacaagaaaccttggcggaagagttaggcatctcccagcaatcggtgtctagcctggagaagagcgaaacgttggaggacaagaagctggaggagatcgccaaagcgctgggtgttaccaaagaaggtatcgagaacttctccgaagagagcgtcctgaacattatctcaaatagcttccacgatcaatctgcgctgaatgcaattctgcatcagccgacctttaacccgattgataaggtggttgaactgtatgaacgtctggtgcaggctgaaaaggacaaagttagctacctggaggagttgctgaaaaagaagtaataagaattcctgctgccaccgctgagcaataactagcataaccccttggggcctctaaacgggtcttgaggggttttttgctgaaacctcaggcatttgagaagcacacggtcacactgcttccggtagtcaataaaccggtaaaccagcaatagacataagcggctatttaacgaccctgccctgaaccgacgaccgggtcatcgtggccggatcttgcggcccctcggcttgaacgaattgttagacattatttgccgactaccttggtgatctcgcctttcacgtagtggacaaattcttccaactgatctgcgcgcgaggccaagcgatcttcttcttgtccaagataagcctgtctagcttcaagtatgacgggctgatactgggccggcaggcgctccattgcccagtcggcagcgacatccttcggcgcgattttgccggttactgcgctgtaccaaatgcgggacaacgtaagcactacatttcgctcatcgccagcccagtcgggcggcgagttccatagcgttaaggtttcatttagcgcctcaaatagatcctgttcaggaaccggatcaaagagttcctccgccgctggacctaccaaggcaacgctatgttctcttgcttttgtcagcaagatagccagatcaatgtcgatcgtggctggctcgaagatacctgcaagaatgtcattgcgctgccattctccaaattgcagttcgcgcttagctggataacgccacggaatgatgtcgtcgtgcacaacaatggtgacttctacagcgcggagaatctcgctctctccaggggaagccgaagtttccaaaaggtcgttgatcaaagctcgccgcgttgtttcatcaagccttacggtcaccgtaaccagcaaatcaatatcactgtgtggcttcaggccgccatccactgcggagccgtacaaatgtacggccagcaacgtcggttcgagatggcgctcgatgacgccaactacctctgatagttgagtcgatacttcggcgatcaccgcttccctcatactcttcctttttcaatattattgaagcatttatcagggttattgtctcatgagcggatacatatttgaatgtatttagaaaaataaacaaatagctagctcactcggtcgctacgctccgggcgtgagactgcggcgggcgctgcggacacatacaaagttacccacagattccgtggataagcaggggactaacatgtgaggcaaaacagcagggccgcgccggtggcgtttttccataggctccgccctcctgccagagttcacataaacagacgcttttccggtgcatctgtgggagccgtgaggctcaaccatgaatctgacagtacgggcgaaacccgacaggacttaaagatccccaccgtttccggcgggtcgctccctcttgcgctctcctgttccgaccctgccgtttaccggatacctgttccgcctttctcccttacgggaagtgtggcgctttctcatagctcacacactggtatctcggctcggtgtaggtcgttcgctccaagctgggctgtaagcaagaactccccgttcagcccgactgctgcgccttatccggtaactgttcacttgagtccaacccggaaaagcacggtaaaacgccactggcagcagccattggtaactgggagttcgcagaggatttgtttagctaaacacgcggttgctcttgaagtgtgcgccaaagtccggctacactggaaggacagatttggttgctgtgctctgcgaaagccagttaccacggttaagcagttccccaactgacttaaccttcgatcaaaccacctccccaggtggttttttcgtttacagggcaaaagattacgcgcagaaaaaaaggatctcaagaagatcctttgatcttttctactgaaccgctctagatttcagtgcaatttatctcttcaaatgtagcacctgaagtcagccccatacgatataagttgtaattctcatgttagtcatgccccgcgcccaccggaaggagctgactgggttgaaggctctcaagggcatcggtcgagatcccggtgcctaatgagtgagctaacttacattaattgcgttgcgctcactgcccgctttccagtcgggaaacctgtcgtgccagctgcattaatgaatcggccaacgcgcggggagaggcggtttgcgtattgggcgccagggtggtttttcttttcaccagtgagacgggcaacagctgattgcccttcaccgcctggccctgagagagttgcagcaagcggtccacgctggtttgccccagcaggcgaaaatcctgtttgatggtggttaacggcgggatataacatgagctgtcttcggtatcgtcgtatcccactaccgagatgtccgcaccaacgcgcagcccggactcggtaatggcgcgcattgcgcccagcgccatctgatcgttggcaaccagcatcgcagtgggaacgatgccctcattcagcatttgcatggtttgttgaaaaccggacatggcactccagtcgccttcccgttccgctatcggctgaatttgattgcgagtgagatatttatgccagccagccagacgcagacgcgccgagacagaacttaatgggcccgctaacagcgcgatttgctggtgacccaatgcgaccagatgctccacgcccagtcgcgtaccgtcttcatgggagaaaataatactgttgatgggtgtctggtcagagacatcaagaaataacgccggaacattagtgcaggcagcttccacagcaatggcatcctggtcatccagcggatagttaatgatcagcccactgacgcgttgcgcgagaagattgtgcaccgccgctttacaggcttcgacgccgcttcgttctaccatcgacaccaccacgctggcacccagttgatcggcgcgagatttaatcgccgcgacaatttgcgacggcgcgtgcagggccagactggaggtggcaacgccaatcagcaacgactgtttgcccgccagttgttgtgccacgcggttgggaatgtaattcagctccgccatcgccgcttccactttttcccgcgttttcgcagaaacgtggctggcctggttcaccacgcgggaaacggtctgataagagacaccggcatactctgcgacatcgtataacgttactggtttcac

SEQ ID NO: 5932 - DNA, 6524 bp, synthetic construct
  source 1..6524: mol_type = other DNA
attcaccaccctgaattgactctcttccgggcgctatcatgccataccgcgaaaggttttgcgccattcgatggtgtccgggattgacagctagctcagtcctaggtataatgctagcgtggagatatacctcgagaatattttcgagggtgcttgtacacccgcaaggtgagctgaacatttcactcactaaatgcgcttagcatatacaacgcgtgggtatctcttaatttcattagaaaaagatcttaagccgagcatagttgaaaacttaaaaatctatcagcacttactattgctagtaaggaattgcctaatttaatgccttccttcgacgaaaatttgatatttttaaataaggttatccaatttcattttttaagaacagtaaattttacaaagtcgaatgcaattaaaattacctttaagaaacttgataaggagttcataaccaaatttcttacttattttaaaaaaacagactactcctcgaggcggccgcatattttacaaattatgttggaatatattacaacataaatattttatttatatatttatctcatattaatatatttgcgaaacttctttaagtaaaatattagaagcattcgctttgaatcttgtgtcagaaaactggtaatttttaaggaacgagatgataagtggtaatgctcacgacccgggcgtgagcttacttgtcgttccatggtataccagtacctctgatacaataagttaagtctcatgccctttctttttcgacttactttcaaagctaccttctctttacaacttgtaggaattggcttaacctaatccatttaaaaccttgaggttgttacctccacttaaaagcgactgcttgcggccgcaataatagactagcataaccccttggggcctctaaacgggtcttgaggggttttttgctgaacgtacgttttacggctagctcagtcctaggtactatgctagcgtggagatatacggtaccaaggaggtaaataatgggagactacaaagaccatgacggtgattataaagatcatgacatcgattacaaggatgacgatgacaagggaggatccggcagcatgggaaaagatacaataactctaacgaggtcgattcgtttggagatcgacctgccaacgcaggaggagcgccaggaggcgaaaagcaaactgtaccagtggcgttatcgctgccataaggccgctaatctgatcgtgagccacctgtacgtccaagagatgattcaagagttcttctatttgtctgaaggcgtgaagtataaattagtggacgagaagaaggacgaactgggtattttcaaccgctcacgtatgaacaccacttaccgcctggtgtctgatcgttataagggtaaaatgccgaccaatattctctctcagttgaatagcatcatccaaagcagctttaaaaagaaccgtgaagagtactggaaaggcgaacgtagcctgcagaattttaagaaggagatggctttcccgtttaccatggaaggtgtctgtggtctggagttcaacccggaaaagtccgcattctgcttccgctttttcagcattccggttaagacgtacatcggccgtgcatttaacgataaatggaaactgatgcatcaactgaccaagggcgagattaaaatgcgtacctcctatctgaaactgaaggacggcaaaatctttatgatggctgcgttcgagatggaaaaggagaagcaccagctgcgaccggaagtttttgcggaagcgcggctctccctggagtacccgattattgttaagatcggcaaggcgaagttgtccatcggtagccgtgaggagttcctgtaccgtcgtctggcgattcaagcagccagacgtcgcacccgtgagggcgttaagtacgcacgtagtggtaatggtcataagcgtaaaaccaaggcggcggcgcgtttcaaagacaaagaacgcaactatgtgaaccagcgccttcacgtgtatagccgcgaattgatcgatttttgcgttaaacaccaagcgggtactctgatcctggtagatcaggagcagaaaatcgaattggctaaagaggaagcgtttgttctgcgtaactggggttattacgatctgatgaccaaaatcaaatacaaagctgaaaaagccggtattgaattgataatcggctaaggctccggaagaaggagatatacatatgttacagaggatatttgaattgctacaacaaggtcacccggatgctctggagttcatccacacgaagtaccatcgtaatatcttttgggttggtaaacagattttagatgacgactttgcggtggaaaccctggttcaggatacctttctgatcctgtgggaaaaacgcgatcgcatcgagcgaccggagcacatttactacttcttgcgtatggttatgaaacgcgagtgctacacctattacgttcgtccgaagaacaaattctttaaaaccgttaatagcctggagagcttcgagaactatcaggagtacctgcatggttatgacccggaaaaggacgacctgcacctgctgaatcacgagatccaacaaaaagcgtttgaccgtatttctcgtgttctgccgctgttgtccccggagcgccgtcgtctgattgaactttgcttgaaatacgacttccgctataaggcgattggccagttgatgggcacctcgatcacccacacgtccaacgaagtcaagaaagcgatcgtggatattaaaaacattatctgtcagcgtagcattcaagagactaagccaaaaccggtgcttgccgtgaagatccaaagagaaatgacccaggagcaagagaaggtgctgcagttgcgcaccgaacgtcagtatagcttcgccgcaatcgcaaaagagctcaacctgtctgaaaaagaagttcatcaggagttcatgagcgcgtataagctgatgcagctgaagcacgaacagcaacaaagcgcgtaagtccttaagccaaggagacgtaccatgattatactagtagttgatagggctacaatgcaaaacaagaactataaagaggacttcctgctgaagttcggtgaaaactttggcaaaatccgccgttcgaaaagcctctcttttcgttccctgagccagaagtgcgacattgattacgcggatttaaataagatcgagcgcggtaaacgtaatattaccttgaccacgattatcgagctggcaagaggcctggacatccacgctcgtgaattgtttgatttcagcttcaccctgaaggacctggaaaaataataagaattcctgctgccaccgctgagcaataactagcataaccccttggggcctctaaacgggtcttgaggggttttttgctgaaacctcaggcatttgagaagcacacggtcacactgcttccggtagtcaataaaccggtaaaccagcaatagacataagcggctatttaacgaccctgccctgaaccgacgaccgggtcatcgtggccggatcttgcggcccctcggcttgaacgaattgttagacattatttgccgactaccttggtgatctcgcctttcacgtagtggacaaattcttccaactgatctgcgcgcgaggccaagcgatcttcttcttgtccaagataagcctgtctagcttcaagtatgacgggctgatactgggccggcaggcgctccattgcccagtcggcagcgacatccttcggcgcgattttgccggttactgcgctgtaccaaatgcgggacaacgtaagcactacatttcgctcatcgccagcccagtcgggcggcgagttccatagcgttaaggtttcatttagcgcctcaaatagatcctgttcaggaaccggatcaaagagttcctccgccgctggacctaccaaggcaacgctatgttctcttgcttttgtcagcaagatagccagatcaatgtcgatcgtggctggctcgaagatacctgcaagaatgtcattgcgctgccattctccaaattgcagttcgcgcttagctggataacgccacggaatgatgtcgtcgtgcacaacaatggtgacttctacagcgcggagaatctcgctctctccaggggaagccgaagtttccaaaaggtcgttgatcaaagctcgccgcgttgtttcatcaagccttacggtcaccgtaaccagcaaatcaatatcactgtgtggcttcaggccgccatccactgcggagccgtacaaatgtacggccagcaacgtcggttcgagatggcgctcgatgacgccaactacctctgatagttgagtcgatacttcggcgatcaccgcttccctcatactcttcctttttcaatattattgaagcatttatcagggttattgtctcatgagcggatacatatttgaatgtatttagaaaaataaacaaatagctagctcactcggtcgctacgctccgggcgtgagactgcggcgggcgctgcggacacatacaaagttacccacagattccgtggataagcaggggactaacatgtgaggcaaaacagcagggccgcgccggtggcgtttttccataggctccgccctcctgccagagttcacataaacagacgcttttccggtgcatctgtgggagccgtgaggctcaaccatgaatctgacagtacgggcgaaacccgacaggacttaaagatccccaccgtttccggcgggtcgctccctcttgcgctctcctgttccgaccctgccgtttaccggatacctgttccgcctttctcccttacgggaagtgtggcgctttctcatagctcacacactggtatctcggctcggtgtaggtcgttcgctccaagctgggctgtaagcaagaactccccgttcagcccgactgctgcgccttatccggtaactgttcacttgagtccaacccggaaaagcacggtaaaacgccactggcagcagccattggtaactgggagttcgcagaggatttgtttagctaaacacgcggttgctcttgaagtgtgcgccaaagtccggctacactggaaggacagatttggttgctgtgctctgcgaaagccagttaccacggttaagcagttccccaactgacttaaccttcgatcaaaccacctccccaggtggttttttcgtttacagggcaaaagattacgcgcagaaaaaaaggatctcaagaagatcctttgatcttttctactgaaccgctctagatttcagtgcaatttatctcttcaaatgtagcacctgaagtcagccccatacgatataagttgtaattctcatgttagtcatgccccgcgcccaccggaaggagctgactgggttgaaggctctcaagggcatcggtcgagatcccggtgcctaatgagtgagctaacttacattaattgcgttgcgctcactgcccgctttccagtcgggaaacctgtcgtgccagctgcattaatgaatcggccaacgcgcggggagaggcggtttgcgtattgggcgccagggtggtttttcttttcaccagtgagacgggcaacagctgattgcccttcaccgcctggccctgagagagttgcagcaagcggtccacgctggtttgccccagcaggcgaaaatcctgtttgatggtggttaacggcgggatataacatgagctgtcttcggtatcgtcgtatcccactaccgagatgtccgcaccaacgcgcagcccggactcggtaatggcgcgcattgcgcccagcgccatctgatcgttggcaaccagcatcgcagtgggaacgatgccctcattcagcatttgcatggtttgttgaaaaccggacatggcactccagtcgccttcccgttccgctatcggctgaatttgattgcgagtgagatatttatgccagccagccagacgcagacgcgccgagacagaacttaatgggcccgctaacagcgcgatttgctggtgacccaatgcgaccagatgctccacgcccagtcgcgtaccgtcttcatgggagaaaataatactgttgatgggtgtctggtcagagacatcaagaaataacgccggaacattagtgcaggcagcttccacagcaatggcatcctggtcatccagcggatagttaatgatcagcccactgacgcgttgcgcgagaagattgtgcaccgccgctttacaggcttcgacgccgcttcgttctaccatcgacaccaccacgctggcacccagttgatcggcgcgagatttaatcgccgcgacaatttgcgacggcgcgtgcagggccagactggaggtggcaacgccaatcagcaacgactgtttgcccgccagttgttgtgccacgcggttgggaatgtaattcagctccgccatcgccgcttccactttttcccgcgttttcgcagaaacgtggctggcctggttcaccacgcgggaaacggtctgataagagacaccggcatactctgcgacatcgtataacgttactggtttcac

SEQ ID NO: 5933 - DNA, 6674 bp, synthetic construct
  source 1..6674: mol_type = other DNA
attcaccaccctgaattgactctcttccgggcgctatcatgccataccgcgaaaggttttgcgccattcgatggtgtccgggattgacagctagctcagtcctaggtataatgctagcgtggagatatacctcgagacctattgattgactttatgatcagagggtgcttgtacacccgtaaagtgaggtcgcgggcactcaccaaatgcaggaagcatatacaacggcgtgttcatctacacttagaaaacaagagcttttttgtgaggcatataaaataaacaatgttgaattttcaatctagaattttaaatagaatctgagggtacttgtatacccgtagggtgaggctttggcactcactaagtagcatacagcttatatacaatggcgtgagttaattatctttaaaccgttttaaaatgattgtacacaaaaggtcctagttttatccagccttaatactattaaaaattatcccttgataaactacacgttgggttaattgtaaaagttggtttaggttccgaatgaagtgtaatcaacagcttatttttaaagaaaacctcctcgaggcggccgcaaaaactgtagtcttatgagactacattcaaatatttgtttatatttacctcataattatatatttgcgaaacttctttaagtaacatattagaagcattcgctttgaatctcgaatcgaaaactggtaatttttagtacacgagaggataagcagggatgctcacgacccgggcgtgggctctcacttattgtgtacaggtataccagtgccacgattcgataagttgagacctgcgccttttctttattctcagaacatctcaacattcaagccgtgtttcttccttaatgaaggcgagcagccacaccccaatttcgaaattggcaacttgccgggtacccctatgcctacaagcaagccaaaaaaacccttaaataaatgcttatgtaagaattaaaacgggttaagagcggccgcaataatagactagcataaccccttggggcctctaaacgggtcttgaggggttttttgctgaacgtacgttttacggctagctcagtcctaggtactatgctagcgtggagatatacggtaccaaggaggtaaataatgggagactacaaagaccatgacggtgattataaagatcatgacatcgattacaaggatgacgatgacaagggaggatccggcagcatgatgaaaaataagactctatcattaacaagaaagatccaactgaaggtggatctgccgacctacgaggagcgcaaagaggcgattggcaaactataccagtggcagaatcgctgtttcaaggcggccaatattattgttactcatctgtactgccaggagatgattaaagagttcttttacttgacggaagacatccaatataagttggccgaccagaaaaaggacgaaaacggcattctgaaccgctcacgtattaacaccacctaccgcgtcatcgccgaccgttttaaaggcgagatcccgatggaaatcttatctaacctgaaccgtaaccttgagtccagctttaacaaaaacaagccgaaatattggaaaggcgaacgctccctcaagaacttccgccgcgacatcggctttccgttcccggcacgttgcatgtggggtttcaagcacgacccggaacgtaatgcattttgcttccgtctgtttcagatcccgttctgcacctacctgggtcgagacttcagcgataaacgtagcttgctgcatcgtgcggtgaagggtgaggttcgtttgcgcaccagcgaaattaaactgaccgataccaagatcttctggctggcggtatttgatatcgagcaggagcagcatgcactgaagccggaagtcatcgcggaagcgagcctgtcgttggagcacccaatcagcgttaaggtgggtggtaatcgtttgaacatcggtaacaaggaggagttcctgtacagaagactcgcgattcaagctgcgcgtaagcgcgcactggctggcaccgttaattctcgtggtggccatggtcgtacccgtaaactgaaggcggtggaaaaatacaaagacaaagaaaccaagtacgttaatcaacgtctgcacgtgtatagccgtcgcttaattgatttctgtgttaaacaccaggcgggtacactgattctgctgcaccaagaggacaaaatcgaagccgctaaagagaaccaatttgttctgcgtaactggaattattatgaactgacgaagaagattgaatataaagcaaaaaaggctggcatcgagctggtgattgattaaggctccggaagaaggagatatacatatgaaaaggacagcagctgataagcactatacgggtttcaagcacggttgtccggttgctctgaaggcaatttacacccagtaccaccgccaaatctactggatgggtcgtagcctgattaaggacgtttttgtcgtggaaaccttggttcaggataccttcctgaccctgtgggaaaaacgtgagagcattgaatccccgcagcacctggttaattttctgtacacggtgatctctaacgagtgcaaatggtattacgcgcgtccgaaaaaccagtttaaccgcgagtgctatgcgcttgagaaaatggaaaactatcagagcttcatgctgggctatgatccgaccgcagttgatattcatttggaagaccagcaacagcaacaacgtgagtatgagcaggttatcaaggtgttaccgctgctgggcggtcagcgtcagcgcctgatcgagctttgcctgcagcacggcttcaagtacaagatcatctctgaacaactgggcatttcgatcaaggaggcgagcaccactttaaaattgaccattgacgaaattaagaacattctgcatcagggctacgtgctgcaaccacaagagacggaaccgatgcagaatggtgaaggtcaaatgaccgagcaagaggcgcgcgtgctggctctgcgttgtgaacagcagtacagcttcgcccagatcgccaatgagctgcaaatctcccagaaagaagttcatcgtgcgtttaccgcggcatataaattgttgcaacaacacgaacatctccaaagcgcataagtccttaagccaaggagacgtaccatgctaaggttctttacatttatagctaattaccagtttgacatgaacgaagatcaaaaacgccgtctgctgattgagttcggcaagatcgtgaaattccaccgcaccgaaaagctgaaaatctccctgcgtgatttagctaaaaagtgcgatgttgagcacagcgcaattggtaagatcgagaagggtgaaattaaaattcagctgccgacggtctttgaattggcgaagggcctggagatccatccgcgtgacctgtttgacttcgacttcccgttggaggaaaccggtaattaataagaattcctgctgccaccgctgagcaataactagcataaccccttggggcctctaaacgggtcttgaggggttttttgctgaaacctcaggcatttgagaagcacacggtcacactgcttccggtagtcaataaaccggtaaaccagcaatagacataagcggctatttaacgaccctgccctgaaccgacgaccgggtcatcgtggccggatcttgcggcccctcggcttgaacgaattgttagacattatttgccgactaccttggtgatctcgcctttcacgtagtggacaaattcttccaactgatctgcgcgcgaggccaagcgatcttcttcttgtccaagataagcctgtctagcttcaagtatgacgggctgatactgggccggcaggcgctccattgcccagtcggcagcgacatccttcggcgcgattttgccggttactgcgctgtaccaaatgcgggacaacgtaagcactacatttcgctcatcgccagcccagtcgggcggcgagttccatagcgttaaggtttcatttagcgcctcaaatagatcctgttcaggaaccggatcaaagagttcctccgccgctggacctaccaaggcaacgctatgttctcttgcttttgtcagcaagatagccagatcaatgtcgatcgtggctggctcgaagatacctgcaagaatgtcattgcgctgccattctccaaattgcagttcgcgcttagctggataacgccacggaatgatgtcgtcgtgcacaacaatggtgacttctacagcgcggagaatctcgctctctccaggggaagccgaagtttccaaaaggtcgttgatcaaagctcgccgcgttgtttcatcaagccttacggtcaccgtaaccagcaaatcaatatcactgtgtggcttcaggccgccatccactgcggagccgtacaaatgtacggccagcaacgtcggttcgagatggcgctcgatgacgccaactacctctgatagttgagtcgatacttcggcgatcaccgcttccctcatactcttcctttttcaatattattgaagcatttatcagggttattgtctcatgagcggatacatatttgaatgtatttagaaaaataaacaaatagctagctcactcggtcgctacgctccgggcgtgagactgcggcgggcgctgcggacacatacaaagttacccacagattccgtggataagcaggggactaacatgtgaggcaaaacagcagggccgcgccggtggcgtttttccataggctccgccctcctgccagagttcacataaacagacgcttttccggtgcatctgtgggagccgtgaggctcaaccatgaatctgacagtacgggcgaaacccgacaggacttaaagatccccaccgtttccggcgggtcgctccctcttgcgctctcctgttccgaccctgccgtttaccggatacctgttccgcctttctcccttacgggaagtgtggcgctttctcatagctcacacactggtatctcggctcggtgtaggtcgttcgctccaagctgggctgtaagcaagaactccccgttcagcccgactgctgcgccttatccggtaactgttcacttgagtccaacccggaaaagcacggtaaaacgccactggcagcagccattggtaactgggagttcgcagaggatttgtttagctaaacacgcggttgctcttgaagtgtgcgccaaagtccggctacactggaaggacagatttggttgctgtgctctgcgaaagccagttaccacggttaagcagttccccaactgacttaaccttcgatcaaaccacctccccaggtggttttttcgtttacagggcaaaagattacgcgcagaaaaaaaggatctcaagaagatcctttgatcttttctactgaaccgctctagatttcagtgcaatttatctcttcaaatgtagcacctgaagtcagccccatacgatataagttgtaattctcatgttagtcatgccccgcgcccaccggaaggagctgactgggttgaaggctctcaagggcatcggtcgagatcccggtgcctaatgagtgagctaacttacattaattgcgttgcgctcactgcccgctttccagtcgggaaacctgtcgtgccagctgcattaatgaatcggccaacgcgcggggagaggcggtttgcgtattgggcgccagggtggtttttcttttcaccagtgagacgggcaacagctgattgcccttcaccgcctggccctgagagagttgcagcaagcggtccacgctggtttgccccagcaggcgaaaatcctgtttgatggtggttaacggcgggatataacatgagctgtcttcggtatcgtcgtatcccactaccgagatgtccgcaccaacgcgcagcccggactcggtaatggcgcgcattgcgcccagcgccatctgatcgttggcaaccagcatcgcagtgggaacgatgccctcattcagcatttgcatggtttgttgaaaaccggacatggcactccagtcgccttcccgttccgctatcggctgaatttgattgcgagtgagatatttatgccagccagccagacgcagacgcgccgagacagaacttaatgggcccgctaacagcgcgatttgctggtgacccaatgcgaccagatgctccacgcccagtcgcgtaccgtcttcatgggagaaaataatactgttgatgggtgtctggtcagagacatcaagaaataacgccggaacattagtgcaggcagcttccacagcaatggcatcctggtcatccagcggatagttaatgatcagcccactgacgcgttgcgcgagaagattgtgcaccgccgctttacaggcttcgacgccgcttcgttctaccatcgacaccaccacgctggcacccagttgatcggcgcgagatttaatcgccgcgacaatttgcgacggcgcgtgcagggccagactggaggtggcaacgccaatcagcaacgactgtttgcccgccagttgttgtgccacgcggttgggaatgtaattcagctccgccatcgccgcttccactttttcccgcgttttcgcagaaacgtggctggcctggttcaccacgcgggaaacggtctgataagagacaccggcatactctgcgacatcgtataacgttactggtttcac

SEQ ID NO: 5934 - DNA, 8092 bp, synthetic construct
  source 1..8092: mol_type = other DNA
attcaccaccctgaattgactctcttccgggcgctatcatgccataccgcgaaaggttttgcgccattcgatggtgtccgggattgacagctagctcagtcctaggtataatgctagcgtggagatatacctcgagggcaggataatatctgacaatatttaacagctaactaaaatcaaattaaatgagcaatagataaagaccagaacgagactgatcaaatcgaaacctagagctggtaaatgaaccgggttggacctaacataacgtgagttcgggataagaaaaagcgttaatctattatgttgatctttagccgcctctttgatgattatgtgatccccagcaatatcttctctcatcaaaaacctaaaagtaggttcgttttgagataatccaatttgatcaaaagtatcttcaatatacgttcgttttttgagacagaccgtctacgatagatcataaattcgaaaatcctgaaggggattaataattttttaatcagatgaatttggacgagatttacggaatagatatccgaaatcgtctaacgtttacccgctcgacaatctactgaattataagtttgtggcattattagattttttagcttttatttcacgtaatttttcctctgcaatcattactaaatgtggagcactgtatacgtaatctaagattgcatttgtcagggcataaacaattggtaattcgtattggcttaactcaccactatctgcgtgagcccctatatagccaaagtttttctcctcgaggcggccgcgatcaagcaaatttatggactggttttttaccggtaaatcggtaggataccatacctgaaaataacatgtaatggaataactttggtctaaagttacgcattattgtaacgaacagcaatagctggattttctttgacttattggtattgaaaggtattttagcttgtatttataaaaatgtatatattgaggctgcttgtgacgccgtagggtgaggacagatttcactcactaaataatattatcatattttgcaatgttacttagcggtttcccgataaaccgtaaacatatagagatttagactatttatctatgcacaacggcctgttgaatactgcgatcatctaaaaataatttagatgatatcgtaaaaatggataaaggactataccgacttcgatgattgtccttaaatcaacttagaataggttaattcatggtatccagataacagcctatattggatatttacgatcatctatagagttgttttagagcagttttaacgaaacctgattttgatcgagaaaatataataaggaggcttcttgtggagccgcagagtgaggacaatgttcactcactaaattcttctatagaaaaacacaacgttctagacggtaccacaaataaatttatggtctcaaccgatagcatatagggaaaaataaattggttctttctgacattgaaaacagggaaaattctattgaatccttcttatcgcataggactgaaatcggtggtacgtccgtaagttttggaatagattatctaaaaaactttttttatgaacctcttgcgttatttctaaccgatgggataattttagtgggcttctgctcatcctattattttttaagtaaatatgtttgtccaggtggaagctataaaatcataaaaattgaatgatattgaggccgcttgtgaggccacagggtgaggaaaatttcactcactaaatactaattatatgcaacagacggtggtttaatgcatcggtatgaacaaagagtgggccttgctgtagacccattgatattatacgcagctaggtctgctgtaaatctaaatagagttcaggtcatagaattaccatcgccttttcaggtatattgatatatggaaggctatgattagaatacaccataaggtcggttctttttgatcgaattttatagtgacctatacaaaattgacccttgctccccttttatttttcagatcaaaaaaatttatataaaacatgacgcttgattaaaaaccaacgcttttgtttaaagaatatttgatcagatcaaatccttccatacagataacatcattgtatcattcacttttactataaacctatcacatgatctcggttttccagaaaatccgttagggccggccgggacctgggtaggtacatgaccaatagatccatcgcggccgcaataatagactagcataaccccttggggcctctaaacgggtcttgaggggttttttgctgaacgtacgttttacggctagctcagtcctaggtactatgctagcgtggagatatacggtaccaaggaggtaaataatgggagactacaaagaccatgacggtgattataaagatcatgacatcgattacaaggatgacgatgacaagggaggatccggcagcatggaaaaagagtcaattatactaacaaggaaggtgcaaatctacctggattgtgatgacaagggccaacgctctgcgtatttcaaacaattgtttgaatggcaggatatggtttatcgcggtgcgaatatggtcatgacgcatcagtttgtgcaagagcagatcaaggacctgatttacctgcgtgacgacgtgaaagttaaactggctgatttcaagaaagacccggaaggtatcttcaactcctccaagatgaataccacgtaccgcatcctgagcctttacttcaagggcaaactgccgagcaaaatcatcagcgctatgaacatgaccctgaatcgtgcatactccaccgatcgttcctcgtattggaaaggtgaaaaaagcctgcgtaactaccgcaaagacatgccgattccgtttggtggtgatcaactgaagttgggaaacgacgaaaaaggtcgtgacttccgcttcactctgttcaagatcccgtttcgtacctacctgggcaaggaccgctctgataaacgcatcctgctgcaacgttgcctggttggtcagattaaaatctgcaccagctcgattaagatggtgaagggcaagatctttctgttgctggcgctggagctgccaaaaaagcagcacgatctgaaggagcacattatcgccgaagccagcctctctgtagagcacccgattaccgttagcattgaccgtgacaactttcagatcggcaacaaagaagagttcttgtaccgccgtctcgcgattcaggcggcgcgtcatcgtatccagaaagcagttgcatttaacagaggcggccatggtagacggaagaagttgaagtctctggaacactttaccgaacgtgaaaagcgttatgtcgatagcaaattacacctgtatagccgtcgtctaattgacgtttgcgttaatagcggtgcgggcaccttgctactggtgaaccagagcaataaagaggaggctgcgaaagaggatcgtttcttgttgcgcaactggggttattatggtctgattgaaaagattcgttacaaagccaatatggcgggcattaacgtgatcgtggagtaaggctccggaagaaggagatatacatatgaatgaaactctaaggcaacaggagacagaccgccacattgcgctgctccgcaagggcgacgaaaagggcctgaatttcttctaccgccgtttctacggctatatctttgcgcgtgcgttccgcgcgacccaagatgattgtgcggcaaaatcgatcgctcaagaggctctgttgcgcctgtggctgtttcgtaaacaattgaaggacgctgaagacatccaggcattcctgaaagcccaagtgcgttccagcatcaacgcgtactataacaaaacccgtaatcgtttccaccgctctttgctgcgtttggactccatcgaagactaccaggagttcctgttaggtcatgagatggaagaggaggaggagatggatattgtttatctggaaagattggaccaggagaagcagcaacgtcttatccagctggataacctaatgccgagcctgaatggtcagcaacaaatgtttatcaaactgtgcctgaagtacagctttaactatgaacgtattgcctattacctgggtggtattagcgattatcaggtgagcctgcaggttgaaaagaacgatcgttacccgacgttttacattcagtaagtccttaagccaaggagacgtaccatgaatgctatatttagggagaaaaacgaaaacatgcatattggccataacatcaagcgcattcgtgaaatccaaggtattaagcaagaagcatttggtcagctgtgccgtaatcgttatagccagcagcgcatcagcgacttcgagaacatggttgccttggacgagccgctcttgaatgagctggcgtctgcattaggcgtgaccccggaatttgtcaaaagctttaaagaggaaaacgtgatttacaatatccagcactcccataccttcaatgatcactctacgaacagcagccaacacacccagccgactttcaactccgatggtagcgacaaactggttgcgttgctggaacgcttcatcgaagaggatcgtgcgaaaacccgtagcattgcggaactgagtaaagctgtgctggacctgaccaacgaggttaagaagatcaaggagggcaaataagtcctaaagccaaggagacgtacaatggaacaaatgaataggtcaagtaaaatagtcgcccaaggtgagctggacgagcagcaggcggaaattttccacatgcgttaccagttgcaactgagctttgatcagattagcgaagcactgcatctcgacccgtccaccgttcgtaaaatcttcgtgcaggcgcacaccaagatccgcacggctcaacgtacctaataagaattcctgctgccaccgctgagcaataactagcataaccccttggggcctctaaacgggtcttgaggggttttttgctgaaacctcaggcatttgagaagcacacggtcacactgcttccggtagtcaataaaccggtaaaccagcaatagacataagcggctatttaacgaccctgccctgaaccgacgaccgggtcatcgtggccggatcttgcggcccctcggcttgaacgaattgttagacattatttgccgactaccttggtgatctcgcctttcacgtagtggacaaattcttccaactgatctgcgcgcgaggccaagcgatcttcttcttgtccaagataagcctgtctagcttcaagtatgacgggctgatactgggccggcaggcgctccattgcccagtcggcagcgacatccttcggcgcgattttgccggttactgcgctgtaccaaatgcgggacaacgtaagcactacatttcgctcatcgccagcccagtcgggcggcgagttccatagcgttaaggtttcatttagcgcctcaaatagatcctgttcaggaaccggatcaaagagttcctccgccgctggacctaccaaggcaacgctatgttctcttgcttttgtcagcaagatagccagatcaatgtcgatcgtggctggctcgaagatacctgcaagaatgtcattgcgctgccattctccaaattgcagttcgcgcttagctggataacgccacggaatgatgtcgtcgtgcacaacaatggtgacttctacagcgcggagaatctcgctctctccaggggaagccgaagtttccaaaaggtcgttgatcaaagctcgccgcgttgtttcatcaagccttacggtcaccgtaaccagcaaatcaatatcactgtgtggcttcaggccgccatccactgcggagccgtacaaatgtacggccagcaacgtcggttcgagatggcgctcgatgacgccaactacctctgatagttgagtcgatacttcggcgatcaccgcttccctcatactcttcctttttcaatattattgaagcatttatcagggttattgtctcatgagcggatacatatttgaatgtatttagaaaaataaacaaatagctagctcactcggtcgctacgctccgggcgtgagactgcggcgggcgctgcggacacatacaaagttacccacagattccgtggataagcaggggactaacatgtgaggcaaaacagcagggccgcgccggtggcgtttttccataggctccgccctcctgccagagttcacataaacagacgcttttccggtgcatctgtgggagccgtgaggctcaaccatgaatctgacagtacgggcgaaacccgacaggacttaaagatccccaccgtttccggcgggtcgctccctcttgcgctctcctgttccgaccctgccgtttaccggatacctgttccgcctttctcccttacgggaagtgtggcgctttctcatagctcacacactggtatctcggctcggtgtaggtcgttcgctccaagctgggctgtaagcaagaactccccgttcagcccgactgctgcgccttatccggtaactgttcacttgagtccaacccggaaaagcacggtaaaacgccactggcagcagccattggtaactgggagttcgcagaggatttgtttagctaaacacgcggttgctcttgaagtgtgcgccaaagtccggctacactggaaggacagatttggttgctgtgctctgcgaaagccagttaccacggttaagcagttccccaactgacttaaccttcgatcaaaccacctccccaggtggttttttcgtttacagggcaaaagattacgcgcagaaaaaaaggatctcaagaagatcctttgatcttttctactgaaccgctctagatttcagtgcaatttatctcttcaaatgtagcacctgaagtcagccccatacgatataagttgtaattctcatgttagtcatgccccgcgcccaccggaaggagctgactgggttgaaggctctcaagggcatcggtcgagatcccggtgcctaatgagtgagctaacttacattaattgcgttgcgctcactgcccgctttccagtcgggaaacctgtcgtgccagctgcattaatgaatcggccaacgcgcggggagaggcggtttgcgtattgggcgccagggtggtttttcttttcaccagtgagacgggcaacagctgattgcccttcaccgcctggccctgagagagttgcagcaagcggtccacgctggtttgccccagcaggcgaaaatcctgtttgatggtggttaacggcgggatataacatgagctgtcttcggtatcgtcgtatcccactaccgagatgtccgcaccaacgcgcagcccggactcggtaatggcgcgcattgcgcccagcgccatctgatcgttggcaaccagcatcgcagtgggaacgatgccctcattcagcatttgcatggtttgttgaaaaccggacatggcactccagtcgccttcccgttccgctatcggctgaatttgattgcgagtgagatatttatgccagccagccagacgcagacgcgccgagacagaacttaatgggcccgctaacagcgcgatttgctggtgacccaatgcgaccagatgctccacgcccagtcgcgtaccgtcttcatgggagaaaataatactgttgatgggtgtctggtcagagacatcaagaaataacgccggaacattagtgcaggcagcttccacagcaatggcatcctggtcatccagcggatagttaatgatcagcccactgacgcgttgcgcgagaagattgtgcaccgccgctttacaggcttcgacgccgcttcgttctaccatcgacaccaccacgctggcacccagttgatcggcgcgagatttaatcgccgcgacaatttgcgacggcgcgtgcagggccagactggaggtggcaacgccaatcagcaacgactgtttgcccgccagttgttgtgccacgcggttgggaatgtaattcagctccgccatcgccgcttccactttttcccgcgttttcgcagaaacgtggctggcctggttcaccacgcgggaaacggtctgataagagacaccggcatactctgcgacatcgtataacgttactggtttcac

SEQ ID NO: 5935 - DNA, 6744 bp, synthetic construct
  source 1..6744: mol_type = other DNA
attcaccaccctgaattgactctcttccgggcgctatcatgccataccgcgaaaggttttgcgccattcgatggtgtccgggattgacagctagctcagtcctaggtataatgctagcgtggagatatacctcgagaaagatttttttaggggctgtccgcacagccataggttggggctattcgcactcaataagtgaaagcatgcggttaaggcgtgagaaacctacatctaagcttgtaattccagtttttgtggcgtttaactggacttttgggattatttcggggatttattttctttttcaaatgaattttcattttccatttgcgctgataaaagtacacgtctacatttgaaactatagttaacctatagaataaatatattaaatctcctcgaggcggccgcactcttatgtattgcaatataaatatattagaaaacgatataaatttttgcttggtgtattgaaaaacgttatgtttatagcgaaaaaagataacatagtttttatgagactagttcttcctcaacctgaatattacaagatagcccttctgaatttgcttaagttgttgcagcttaaaggaataccaaaagaaagtattgaagacgtaaagcgtgtttacgaattgttggaaattttagatgctaacattaatgagcaaaacatttcttaagacccgcggccgcaataatagactagcataaccccttggggcctctaaacgggtcttgaggggttttttgctgaacgtacgttttacggctagctcagtcctaggtactatgctagcgtggagatatacggtaccaaggaggtaaataatgggagactacaaagaccatgacggtgattataaagatcatgacatcgattacaaggatgacgatgacaagggaggatccggcagcatggaaaaaataattctaacaaggaagatacaactggtgattccgtgtaaagaccgcgaaatcctgaagtcttactacgatcgcctttatgagttccagcgtcatacctgtaaagctgccaacctgatccacacccatctgttcatccaagatcgttggaaagaaatggtttatttagcggaagatgcaaagatcagcctggcggatcataaaaagaaggagggtggtgttttgaatacgagccgtatgaacagcacgtaccgccagctgtctgcgcattttctgaaagttctgccgagcaataccatgagcaacctgaaccaagccgtttaccgcacctatcaggcgaaccgtgacctgtattggcgtggtgaaaagtcgctcccaaattatagacgcgacatcccgattccgtttagtagccgtgagatgcgttgggaagaagcgggtgacggcaagaactttttgctgtacctctttcgtattccgttcaaaacttatctgggtcgtgaccgcagcgaactgaaatcgttgctcaaaaaaatcgtgaaaggcgagatcgcgctgcgtcaaagcgcgctgcaaatcaaaaacaacaaaatttatctgttggcgtccgtggaagtcgagaaagctaagcacagcctggataaaaccctgattgcggaagtggcattgtctctggaatatccgctggtcatcaaaatcggtaaggacgagttccagatcggcagcaaagaggagttcttgtaccgccgcttgtccattcaggcggcgcgtcgtagacttcaacaggcctgcgcatatcgctctggtggcaagggtaaggaagaacgttataagtgcctgaaacactataaagagaaggagaagaactacattgaagagaaattacacctgtacagccgtcgtctgattgattactgcgttaaggctggcgcaggcaccattctgttggtaaatcagtcctacaaagaggaactggctaaggaggacccgatgctgttacgtaattggtcctactacggcctgaaagagaagatcgcctacaaggcgaagatggcaggtattcacgtgttggttgagtaaggctccggaagaaggagatatacatatgaatattgaaaatataaacctaataaaattgaagaacggtaatgaagcgggtctgagctacttctatcgtcgtttttttccgtggtatacctttcgtgcgttccgctatatgcgtgacgacctggacgcccaatgtgcagtgcaggaggcgtttctccgtctttggctgaatcgtgctcaagtcgattctgtcgagagcatgcatgagttcctgaagcgccaggtgcaggaagcggcaaaagcattccaccgcaaaaggagcaacgagttcagaaagagcatgctgtattactttgactacgatgacccggatatcctgatcggccatagagccgtggaagaagaggttaccgaagagttacaaccagacgcgagcgatcaggagaaactggactcaattcaccgtttgttaccgcatctgggccgtgagcaagagttgtttatccgcctttgcctgcgttttaatttcaactacgagcgcatcgcgttctacctgggtggtattcgcgactacgaggtggctaataaggtgaacaaatgcattgtacaactgaaaaccctggttgcggattcctccaagttgtctagcgcatccaaaatggaaaccattcgtgttgatgaacgtttgacgccggaacaggcggaagttctcaagctgcgctatgagctgggcgcgtcgttcgatgacattggtcaggctctgcagatgccggtgtcgcgtgttcgtgaaatcttcatccaagccttcaccgtttttaaacacggcaaaaaccacagctacagcaagaacacggtgagctatagtctgtaagtccttaagccaaggagacgtaccatgacaaaaaaaaagactccctttggaaaatacctggagagcaagtctatcaaccaggcggctctggcgcgtaccaccggtattcgtccgaatcgcattagcgagttcgccacccaagattgcctgaaaatgcgcgcagacgagatctacctgttagctaaagcgctgggcgaacgtccgggtacgctgctcgactatttgttggcggaaatcaagtcctaagtcctaaagccaaggagacgtacaatggaacccaagatacacgagggaaaaaatgtgaaacgtttccgcgagatgctgggcattaaacaagaggcgctggcacaggagctgggtgaagactggacccagaagaaagtgtccctgatggaacaaaaggcggtccttgagccggaagttctctacaaagttagcaaggctttgaatataccggacatggcgatcaagaactttgatgaagaaaaggccatcaccattatcgctaataccgttaataacaacgatcatgcgacgggtaatagcctgttcaactatcagccgatctttaacccgattgataaaatcgtgcagttgcacgaagagaagatccagctgtacgaacgtatgctgcgtgagaaagaggacatgattaacaaattggagaagctgctgccacaaaactaataagaattcctgctgccaccgctgagcaataactagcataaccccttggggcctctaaacgggtcttgaggggttttttgctgaaacctcaggcatttgagaagcacacggtcacactgcttccggtagtcaataaaccggtaaaccagcaatagacataagcggctatttaacgaccctgccctgaaccgacgaccgggtcatcgtggccggatcttgcggcccctcggcttgaacgaattgttagacattatttgccgactaccttggtgatctcgcctttcacgtagtggacaaattcttccaactgatctgcgcgcgaggccaagcgatcttcttcttgtccaagataagcctgtctagcttcaagtatgacgggctgatactgggccggcaggcgctccattgcccagtcggcagcgacatccttcggcgcgattttgccggttactgcgctgtaccaaatgcgggacaacgtaagcactacatttcgctcatcgccagcccagtcgggcggcgagttccatagcgttaaggtttcatttagcgcctcaaatagatcctgttcaggaaccggatcaaagagttcctccgccgctggacctaccaaggcaacgctatgttctcttgcttttgtcagcaagatagccagatcaatgtcgatcgtggctggctcgaagatacctgcaagaatgtcattgcgctgccattctccaaattgcagttcgcgcttagctggataacgccacggaatgatgtcgtcgtgcacaacaatggtgacttctacagcgcggagaatctcgctctctccaggggaagccgaagtttccaaaaggtcgttgatcaaagctcgccgcgttgtttcatcaagccttacggtcaccgtaaccagcaaatcaatatcactgtgtggcttcaggccgccatccactgcggagccgtacaaatgtacggccagcaacgtcggttcgagatggcgctcgatgacgccaactacctctgatagttgagtcgatacttcggcgatcaccgcttccctcatactcttcctttttcaatattattgaagcatttatcagggttattgtctcatgagcggatacatatttgaatgtatttagaaaaataaacaaatagctagctcactcggtcgctacgctccgggcgtgagactgcggcgggcgctgcggacacatacaaagttacccacagattccgtggataagcaggggactaacatgtgaggcaaaacagcagggccgcgccggtggcgtttttccataggctccgccctcctgccagagttcacataaacagacgcttttccggtgcatctgtgggagccgtgaggctcaaccatgaatctgacagtacgggcgaaacccgacaggacttaaagatccccaccgtttccggcgggtcgctccctcttgcgctctcctgttccgaccctgccgtttaccggatacctgttccgcctttctcccttacgggaagtgtggcgctttctcatagctcacacactggtatctcggctcggtgtaggtcgttcgctccaagctgggctgtaagcaagaactccccgttcagcccgactgctgcgccttatccggtaactgttcacttgagtccaacccggaaaagcacggtaaaacgccactggcagcagccattggtaactgggagttcgcagaggatttgtttagctaaacacgcggttgctcttgaagtgtgcgccaaagtccggctacactggaaggacagatttggttgctgtgctctgcgaaagccagttaccacggttaagcagttccccaactgacttaaccttcgatcaaaccacctccccaggtggttttttcgtttacagggcaaaagattacgcgcagaaaaaaaggatctcaagaagatcctttgatcttttctactgaaccgctctagatttcagtgcaatttatctcttcaaatgtagcacctgaagtcagccccatacgatataagttgtaattctcatgttagtcatgccccgcgcccaccggaaggagctgactgggttgaaggctctcaagggcatcggtcgagatcccggtgcctaatgagtgagctaacttacattaattgcgttgcgctcactgcccgctttccagtcgggaaacctgtcgtgccagctgcattaatgaatcggccaacgcgcggggagaggcggtttgcgtattgggcgccagggtggtttttcttttcaccagtgagacgggcaacagctgattgcccttcaccgcctggccctgagagagttgcagcaagcggtccacgctggtttgccccagcaggcgaaaatcctgtttgatggtggttaacggcgggatataacatgagctgtcttcggtatcgtcgtatcccactaccgagatgtccgcaccaacgcgcagcccggactcggtaatggcgcgcattgcgcccagcgccatctgatcgttggcaaccagcatcgcagtgggaacgatgccctcattcagcatttgcatggtttgttgaaaaccggacatggcactccagtcgccttcccgttccgctatcggctgaatttgattgcgagtgagatatttatgccagccagccagacgcagacgcgccgagacagaacttaatgggcccgctaacagcgcgatttgctggtgacccaatgcgaccagatgctccacgcccagtcgcgtaccgtcttcatgggagaaaataatactgttgatgggtgtctggtcagagacatcaagaaataacgccggaacattagtgcaggcagcttccacagcaatggcatcctggtcatccagcggatagttaatgatcagcccactgacgcgttgcgcgagaagattgtgcaccgccgctttacaggcttcgacgccgcttcgttctaccatcgacaccaccacgctggcacccagttgatcggcgcgagatttaatcgccgcgacaatttgcgacggcgcgtgcagggccagactggaggtggcaacgccaatcagcaacgactgtttgcccgccagttgttgtgccacgcggttgggaatgtaattcagctccgccatcgccgcttccactttttcccgcgttttcgcagaaacgtggctggcctggttcaccacgcgggaaacggtctgataagagacaccggcatactctgcgacatcgtataacgttactggtttcac

SEQ ID NO: 5936 - DNA, 6095 bp, synthetic construct
  source 1..6095: mol_type = other DNA
attcaccaccctgaattgactctcttccgggcgctatcatgccataccgcgaaaggttttgcgccattcgatggtgtccgggattgacagctagctcagtcctaggtataatgctagcgtggagatatacctcgagctgtcaataaaatatgaggctgcttgtacagccgtagggtgtggccttgttgcctcactgaatatggattgaacctgagatcacatctgtatatacaacggctcgcttatcgtgtaaaaataagctttctataagttgtacggttaagttataagcagaacttatagtctcctcgaggcggccgcttatttagttttccgttacgtttttccagacttaaagtacaagtgtttaggcgaactggataaataatttgattttgtttagaaaatctatacattagtaatgttattctaaattagattggatttgcggccgcaataatagactagcataaccccttggggcctctaaacgggtcttgaggggttttttgctgaacgtacgttttacggctagctcagtcctaggtactatgctagcgtggagatatacggtaccaaggaggtaaataatgggagactacaaagaccatgacggtgattataaagatcatgacatcgattacaaggatgacgatgacaagggaggatccggcagcatggctgataatatgtatataacaaggaaaatccaaatcatcgtgaatagtccagataaagacgtggtgtacgacgctatcggtaaacttatgcagtggcagcaggcatgttataagtgcgccaatctgatttacacccatcaattcttgcaggagcagattgcggagatggtttacctggcggatggcgtgaaactgaaaatcagcgatcaccacaaagacgctgacggcatgctggtttccagccgtactaattctacgtacaaagtcctcaccgaaaagtttaagggtgttttaccgtcctccatttataacaacttgaactcgcagctggtaagcaccttcctcaaagagcgtggtttgtatgtcaacggtgaacgctccatccgcaacttcaagcgctcgatcgctatgccgttcagcgcggaaaacattagacgtctgaccgcaggggaccacggtaatttcaccttcatcctgtttggtattccgttccgcacctacttaggccgtggctatgatgaaaagcgcgaactgctccgtcaggttgtgaacggtaagatcaagctggcgtcttcttttctgaaggtcgaacaaaaaaaagtgtttctcctcgcgaccttcgagcaagagaagcagtttcacctgttaggtggtgcaattatcgcggaggcaagcctgagcttggaatatccgctgaccgttaaggttggcaaggcccgtatgaccattggtagcaaagaggagtttctgcatcgtcgtatggcgattcaagccgcccgcagccgtgtgcaggcgagcgttgatggcaacaaagctggccacggcaaggtgcgtaaacgtaagccgctggcgcattatcagagcctggagaaggattacattaagcacaaattgaacgtgtacagcaaacgcctgatcgacttctgcctgcaacatcgcgcagcgacgctgattctgactggtcagcaagaaaaggaagagatcgctatggccgaaccgttcttgctgcgtaactggaattttgccggcctgaaagagatgatcgcgtttaaagcggcgaaagtcggcatcgacctgattgttgaataaggctccggaagaaggagatatacatatggtaggaaaactatgtgaaatatcaagtttcgatgataaagtctttgagaagatcctgaagcagtatcgtttgaccatctactctttcggcaaacgtatgctgaacgacagctacattgttgaaaacattgttcaggatgcgttcttgaagctgtggaattttcgccagacgatcaccagcgacgagcacgcccgtcgtttcctgatgcaaagcgttaagtgggcatgctatagctattttcgcaacagcgactcccgtttccaccgtaacatgatccgtttgaacgactatgacaacccggcggatctgtttggtgaacacccggatgttcaaacctacaatgaccacaccgaagcgctgaatgagagccgcttgaatgaggttaaggaggcgattgacaaagtgtgctacggccgtgaaaaagaggtgatggaactgcattttatcaaaggcctgtcccattcccagatagctgaacgttaccacctctcgattcgtaccgtgaccgttattatcgagaaaggtacagtgcgcctgaagaccatcctcgtgaccgttaagactccggttcatgatattcagttgtctccggcgccaggttttgtagattcgttcaaccatattgaaggtctgaacgaggaacaaaacaaaatctatcacttacgtctgaccggtcgctacgacttcgagcaaatcgccagctttctgcaactgccgctggcgttcgtgcagacggagtatctgaaggcgtggaaaatcgccgcatgtctgaagaaaaaaaatggcaaaccggctggtcgtgctaataagggcattagcggtcgttacggcttactgtctgcataagtccttaagccaaggagacgtaccatgacaaatctaggattgtttttagctaaaaagtccgtgaacaaggcggagatcagccgtaaaacgggtattagcaaaagccgcctgtctgaattaagcatgaacaactcgaccaaactgcgtgcggatgaattgtacctgatcgctctggcaattgacgttgatccgaaagagttgctgaatcacctgttcatggacctcaagctgaaggactaataagaattcctgctgccaccgctgagcaataactagcataaccccttggggcctctaaacgggtcttgaggggttttttgctgaaacctcaggcatttgagaagcacacggtcacactgcttccggtagtcaataaaccggtaaaccagcaatagacataagcggctatttaacgaccctgccctgaaccgacgaccgggtcatcgtggccggatcttgcggcccctcggcttgaacgaattgttagacattatttgccgactaccttggtgatctcgcctttcacgtagtggacaaattcttccaactgatctgcgcgcgaggccaagcgatcttcttcttgtccaagataagcctgtctagcttcaagtatgacgggctgatactgggccggcaggcgctccattgcccagtcggcagcgacatccttcggcgcgattttgccggttactgcgctgtaccaaatgcgggacaacgtaagcactacatttcgctcatcgccagcccagtcgggcggcgagttccatagcgttaaggtttcatttagcgcctcaaatagatcctgttcaggaaccggatcaaagagttcctccgccgctggacctaccaaggcaacgctatgttctcttgcttttgtcagcaagatagccagatcaatgtcgatcgtggctggctcgaagatacctgcaagaatgtcattgcgctgccattctccaaattgcagttcgcgcttagctggataacgccacggaatgatgtcgtcgtgcacaacaatggtgacttctacagcgcggagaatctcgctctctccaggggaagccgaagtttccaaaaggtcgttgatcaaagctcgccgcgttgtttcatcaagccttacggtcaccgtaaccagcaaatcaatatcactgtgtggcttcaggccgccatccactgcggagccgtacaaatgtacggccagcaacgtcggttcgagatggcgctcgatgacgccaactacctctgatagttgagtcgatacttcggcgatcaccgcttccctcatactcttcctttttcaatattattgaagcatttatcagggttattgtctcatgagcggatacatatttgaatgtatttagaaaaataaacaaatagctagctcactcggtcgctacgctccgggcgtgagactgcggcgggcgctgcggacacatacaaagttacccacagattccgtggataagcaggggactaacatgtgaggcaaaacagcagggccgcgccggtggcgtttttccataggctccgccctcctgccagagttcacataaacagacgcttttccggtgcatctgtgggagccgtgaggctcaaccatgaatctgacagtacgggcgaaacccgacaggacttaaagatccccaccgtttccggcgggtcgctccctcttgcgctctcctgttccgaccctgccgtttaccggatacctgttccgcctttctcccttacgggaagtgtggcgctttctcatagctcacacactggtatctcggctcggtgtaggtcgttcgctccaagctgggctgtaagcaagaactccccgttcagcccgactgctgcgccttatccggtaactgttcacttgagtccaacccggaaaagcacggtaaaacgccactggcagcagccattggtaactgggagttcgcagaggatttgtttagctaaacacgcggttgctcttgaagtgtgcgccaaagtccggctacactggaaggacagatttggttgctgtgctctgcgaaagccagttaccacggttaagcagttccccaactgacttaaccttcgatcaaaccacctccccaggtggttttttcgtttacagggcaaaagattacgcgcagaaaaaaaggatctcaagaagatcctttgatcttttctactgaaccgctctagatttcagtgcaatttatctcttcaaatgtagcacctgaagtcagccccatacgatataagttgtaattctcatgttagtcatgccccgcgcccaccggaaggagctgactgggttgaaggctctcaagggcatcggtcgagatcccggtgcctaatgagtgagctaacttacattaattgcgttgcgctcactgcccgctttccagtcgggaaacctgtcgtgccagctgcattaatgaatcggccaacgcgcggggagaggcggtttgcgtattgggcgccagggtggtttttcttttcaccagtgagacgggcaacagctgattgcccttcaccgcctggccctgagagagttgcagcaagcggtccacgctggtttgccccagcaggcgaaaatcctgtttgatggtggttaacggcgggatataacatgagctgtcttcggtatcgtcgtatcccactaccgagatgtccgcaccaacgcgcagcccggactcggtaatggcgcgcattgcgcccagcgccatctgatcgttggcaaccagcatcgcagtgggaacgatgccctcattcagcatttgcatggtttgttgaaaaccggacatggcactccagtcgccttcccgttccgctatcggctgaatttgattgcgagtgagatatttatgccagccagccagacgcagacgcgccgagacagaacttaatgggcccgctaacagcgcgatttgctggtgacccaatgcgaccagatgctccacgcccagtcgcgtaccgtcttcatgggagaaaataatactgttgatgggtgtctggtcagagacatcaagaaataacgccggaacattagtgcaggcagcttccacagcaatggcatcctggtcatccagcggatagttaatgatcagcccactgacgcgttgcgcgagaagattgtgcaccgccgctttacaggcttcgacgccgcttcgttctaccatcgacaccaccacgctggcacccagttgatcggcgcgagatttaatcgccgcgacaatttgcgacggcgcgtgcagggccagactggaggtggcaacgccaatcagcaacgactgtttgcccgccagttgttgtgccacgcggttgggaatgtaattcagctccgccatcgccgcttccactttttcccgcgttttcgcagaaacgtggctggcctggttcaccacgcgggaaacggtctgataagagacaccggcatactctgcgacatcgtataacgttactggtttcac

SEQ ID NO: 5937 - DNA, 6634 bp, synthetic construct
  source 1..6634: mol_type = other DNA
attcaccaccctgaattgactctcttccgggcgctatcatgccataccgcgaaaggttttgcgccattcgatggtgtccgggattgacagctagctcagtcctaggtataatgctagcgtggagatatacctcgagatcttgcttttctgaggctgcttgtacagccgcatggtgaggctatgcaaggcactcactaagtatcctgacggatatatacaatggcccctattagcttttggccactagttatatcaagagggatgtttacaattgggcctacttattcgttttggagggaaatctattctatccctctgcccgaaaaaaggaggatgaaacaagaaaaagaatcctcggtggtgatatacgattgcccttttcaactagcttttagaccaactattggcaatcgtatatcggcgccggggggccaaagccggtacgggtgcccggttttattctcccgctgatcggctgcggctgcttataccgaagcccacaattcaattcgggacgcactacgccccgaattgagttgtaggaaattcaagttgccaggagattaaaaaaggaccgatgaacgaatggggcctgaaggcagagatagacatgaaagattcctactagttcattgataaacctgcaaagcaactgacgaggcgggagcgctcctcgaggcggccgctaatcacctattggcaagtataaaggtgcggtattcttgtgtccttgacaatcacccataggtaagtatttgagggtttatgcggccgcaataatagactagcataaccccttggggcctctaaacgggtcttgaggggttttttgctgaacgtacgttttacggctagctcagtcctaggtactatgctagcgtggagatatacggtaccaaggaggtaaataatgggagactacaaagaccatgacggtgattataaagatcatgacatcgattacaaggatgacgatgacaagggaggatccggcagcatgaatgctgaaacaatgatactaactaggaaggtgcaactgataattgacagcaacgataaggcgtttattggcgaggtgtacagaaccctgtaccgctggcagtacatttgctttcgcgcggctaactatatttttacgcatcttttcatccaagaacagctcaaggaactgttctacctaaaggacgaggtcaaggtgaaattggctgattgttgcaaaaacccggatggcatcctgacgtgcagccagttgggcaccacgtatagagtattgaacaaacacttcaaaggcgatatcccgatgaatatcatctcctctctgaatatgaccttggccaagcacttcaacaacgaaaaggagggttatctgaaaggcgagaagtccgtgcgtaattacaaacgcgatattccgattccatttcagcgtcgtaacattacccgtctgcaattggccgaaaatgcaaaggagtataaatttaatctgttcaaaatcccgtttcacacctatctgggccgtgacaagtttgacaagcgtctcttgttcgaccgtctgctgaaaggtgaggtccagctgaagaactcttcattacagctgtgcaacggtaagatctacctgctggcggctttcgagactcgtaaagagaagcacgaactggatgcgtcgatcgtggcggaagcgcatctgagcatcgactacccgatcgtggttcggattgggaaattccaagctaccatcggcagcaaagaggagttcctgtaccgtagactggcgatccaagcagcccgtagccgtgcgcagaaagacgcatcgtacaatcgtggtcaacatggtagacgtcgcaagctgaaggccttagaacatttccgcgatcgcgaacgtgactatgttcagcagcgtctgcacgtttatagccgtcaattgattgacctgtgtgttaagcaccgcgcggcgagcctgatcctggttggtcaaaccgaaaaagaggcagcggctgcaggtgaggagttcgtttttcgcaactggtcctactacgcactgaaagaaaaaattcagtataaagcgaacaaagcgggcattatgctgatcaccgagtaaggctccggaagaaggagatatacatatgagttatgaactaccaacacccactgagcaagcgtatttcctccgctataaaaacggcgaagaggagggtttcacccagctgtaccgcatgatgttcaacagcctgctgcgctacggcatgcgtattctgcccaacgagttcgctgtgaccaccatcgtacaggatgcgttgttgaaggcttgggattttcgtgaacgtatgacctgtctgcaacacacctttcgttttatgtgcatgaatgttaaatgggcctgctacgactactaccgccaaccggaaatccgccaggtcgtgtatctagaccacgacacctacccggatgttagcttcctgccgggttcggaagaggcgggtccggtgtgcaatgaagaggcgctgctgaaaagcatttatgacgtgatgccgtatctgccgatgaacaaacaaacgatcctgcagttgtacttcaagtacggcttctcttacaagcagattgcgaaacgttacggcgcaaatatccagaccatttccaagaacctgcatgaagcgctcgcgtatctgaagaaagttattcactccaagaagcagctgaccaaaccgatttcttttccggttacgaacgacaaataccaggcagaggagtacctgactggtgaaatgctgcaattgtttaaacttcgttacgagagcaagctgccgtttgatgtcatcgccgcgaaattgaatctgccacagccgtatatccagcagcaatatgcagctgcccatgcgaagctgcaacaattgaagatcagccgtcgtccgtaagtccttaagccaaggagacgtaccatgaaaacaaagattgatctatatgtaataacccgtgtgaaagagaagcgcctggaaaagaacatcagccaggcagaattagctaatgaactgggtatgtctgttggttttatcggcaaagtcgagtccccgaagtacccgagccattataacattaagcacctgaaccagttggcgaaaattctggactgcagcccgcaagagttcttgccaaagaaaccgctgccgtaagtcctaaagccaaggagacgtacaatgaagtcaaaaatagatatttatgtaatagacaaggtgcgcgagatgcgtattgcgcataatatgtcgcaagaggaattgtctatcaaggcgggttttcgtagcaatggcttcgtcggtcaggcagagagctttaaatacaacaaacgttataacgttcaccacatcaaccgcttcgctcaaattttcaactgctccccgcaggattttctgccggaaacctatctgtactaataagaattcctgctgccaccgctgagcaataactagcataaccccttggggcctctaaacgggtcttgaggggttttttgctgaaacctcaggcatttgagaagcacacggtcacactgcttccggtagtcaataaaccggtaaaccagcaatagacataagcggctatttaacgaccctgccctgaaccgacgaccgggtcatcgtggccggatcttgcggcccctcggcttgaacgaattgttagacattatttgccgactaccttggtgatctcgcctttcacgtagtggacaaattcttccaactgatctgcgcgcgaggccaagcgatcttcttcttgtccaagataagcctgtctagcttcaagtatgacgggctgatactgggccggcaggcgctccattgcccagtcggcagcgacatccttcggcgcgattttgccggttactgcgctgtaccaaatgcgggacaacgtaagcactacatttcgctcatcgccagcccagtcgggcggcgagttccatagcgttaaggtttcatttagcgcctcaaatagatcctgttcaggaaccggatcaaagagttcctccgccgctggacctaccaaggcaacgctatgttctcttgcttttgtcagcaagatagccagatcaatgtcgatcgtggctggctcgaagatacctgcaagaatgtcattgcgctgccattctccaaattgcagttcgcgcttagctggataacgccacggaatgatgtcgtcgtgcacaacaatggtgacttctacagcgcggagaatctcgctctctccaggggaagccgaagtttccaaaaggtcgttgatcaaagctcgccgcgttgtttcatcaagccttacggtcaccgtaaccagcaaatcaatatcactgtgtggcttcaggccgccatccactgcggagccgtacaaatgtacggccagcaacgtcggttcgagatggcgctcgatgacgccaactacctctgatagttgagtcgatacttcggcgatcaccgcttccctcatactcttcctttttcaatattattgaagcatttatcagggttattgtctcatgagcggatacatatttgaatgtatttagaaaaataaacaaatagctagctcactcggtcgctacgctccgggcgtgagactgcggcgggcgctgcggacacatacaaagttacccacagattccgtggataagcaggggactaacatgtgaggcaaaacagcagggccgcgccggtggcgtttttccataggctccgccctcctgccagagttcacataaacagacgcttttccggtgcatctgtgggagccgtgaggctcaaccatgaatctgacagtacgggcgaaacccgacaggacttaaagatccccaccgtttccggcgggtcgctccctcttgcgctctcctgttccgaccctgccgtttaccggatacctgttccgcctttctcccttacgggaagtgtggcgctttctcatagctcacacactggtatctcggctcggtgtaggtcgttcgctccaagctgggctgtaagcaagaactccccgttcagcccgactgctgcgccttatccggtaactgttcacttgagtccaacccggaaaagcacggtaaaacgccactggcagcagccattggtaactgggagttcgcagaggatttgtttagctaaacacgcggttgctcttgaagtgtgcgccaaagtccggctacactggaaggacagatttggttgctgtgctctgcgaaagccagttaccacggttaagcagttccccaactgacttaaccttcgatcaaaccacctccccaggtggttttttcgtttacagggcaaaagattacgcgcagaaaaaaaggatctcaagaagatcctttgatcttttctactgaaccgctctagatttcagtgcaatttatctcttcaaatgtagcacctgaagtcagccccatacgatataagttgtaattctcatgttagtcatgccccgcgcccaccggaaggagctgactgggttgaaggctctcaagggcatcggtcgagatcccggtgcctaatgagtgagctaacttacattaattgcgttgcgctcactgcccgctttccagtcgggaaacctgtcgtgccagctgcattaatgaatcggccaacgcgcggggagaggcggtttgcgtattgggcgccagggtggtttttcttttcaccagtgagacgggcaacagctgattgcccttcaccgcctggccctgagagagttgcagcaagcggtccacgctggtttgccccagcaggcgaaaatcctgtttgatggtggttaacggcgggatataacatgagctgtcttcggtatcgtcgtatcccactaccgagatgtccgcaccaacgcgcagcccggactcggtaatggcgcgcattgcgcccagcgccatctgatcgttggcaaccagcatcgcagtgggaacgatgccctcattcagcatttgcatggtttgttgaaaaccggacatggcactccagtcgccttcccgttccgctatcggctgaatttgattgcgagtgagatatttatgccagccagccagacgcagacgcgccgagacagaacttaatgggcccgctaacagcgcgatttgctggtgacccaatgcgaccagatgctccacgcccagtcgcgtaccgtcttcatgggagaaaataatactgttgatgggtgtctggtcagagacatcaagaaataacgccggaacattagtgcaggcagcttccacagcaatggcatcctggtcatccagcggatagttaatgatcagcccactgacgcgttgcgcgagaagattgtgcaccgccgctttacaggcttcgacgccgcttcgttctaccatcgacaccaccacgctggcacccagttgatcggcgcgagatttaatcgccgcgacaatttgcgacggcgcgtgcagggccagactggaggtggcaacgccaatcagcaacgactgtttgcccgccagttgttgtgccacgcggttgggaatgtaattcagctccgccatcgccgcttccactttttcccgcgttttcgcagaaacgtggctggcctggttcaccacgcgggaaacggtctgataagagacaccggcatactctgcgacatcgtataacgttactggtttcac

SEQ ID NO: 5938 - DNA, 7426 bp, synthetic construct
  source 1..7426: mol_type = other DNA
attcaccaccctgaattgactctcttccgggcgctatcatgccataccgcgaaaggttttgcgccattcgatggtgtccgggattgacagctagctcagtcctaggtataatgctagcgtggagatatacctcgagacaacgctgttaaaagttctttgaaaataaataaatataagcggctgcttatacagccgtagagtgaggttagattagcactcactaattatttcatataggcttttatcaattctaaggtatgaactttaaattcacttgtaaacaattacaattttcttgatggtacacataaaagtaagaagtgttgtagattattagtatcataaaaaacactatcaagaatgcaaaatgtaagtttagacaactttattaaaattcctttgaaaataaattagacattagaggttgcttgtacagccgcagggtgaggtcattaacactcactaaatttttttatatgaattatatcaatagtaaactttaaggtttcaattcattataaagcaaaatacaatttcttgacggtacacataattttgtaaataggttaggtggtcatggcagtgagcgtaaaagttaagccaggttttgaaaataaattaatttatagaggttgtttgtacagccatagggtgaggttacataataactcactaatttcgaaaaatacaatctcttagcggtgcaggtaatttttcgctggcattcaaatcatttatagaggctgcttgtacagccgtatggtgaggttatattagcactcactaattttttcatatatgtgtttatcaatcgtaagctataaggtttgaactcatgtagaagtaaaatacaatttcttagcggtacatataaactcgcaggaattgagatgatcgctgaataaagtgtggtgttaaaagcttcttaagaataaattagaaattagaggctgcctgtacagccgtagggtgaggttactctgacactcactaattctgtatatggttttatcaatcgtaaactatttgaaagcaaatacattgcttctgctgttttccggtagcgtaatctcaccaacctattcatgaagttctttaaaaccatagaagctatcgcgtgaaaaccggactattctactggattaagatatattcaccaacgctgaacgagtggccaaaatgtgggtatcatgtgcatttgcaataatctcatcttgcatttttgttgcaatttaccagtgggtgcttaacttttatcattacttcatcgatttatgaaatttacatttcctctgatttaaatttaccaaatctcttcacgtcgataagcagcaactgttggagggttaccaggaccagctggctgccggcacaaggtgatacaacgactgactcctcgaggcggccgcacaacaaatataaaaaaaattactgtgagtattatactctcattatgtggtaaaataccacagattttggtgggttacggcaattaaactctggaaattcgcataacaagtaaatacaaaactatgaataatgaggatgtcatttctaaaaaacagaggtgaaccgccgacaggcaactttctattataaatgctaacgttaatcaacctaccgcggccgcaataatagactagcataaccccttggggcctctaaacgggtcttgaggggttttttgctgaacgtacgttttacggctagctcagtcctaggtactatgctagcgtggagatatacggtaccaaggaggtaaataatgggagactacaaagaccatgacggtgattataaagatcatgacatcgattacaaggatgacgatgacaagggaggatccggcagcatggaatcaaataaaatggtaataacaaggaagatccaactgctgattgattcggaggacaaggaggaggtcaagaagatgaaagaccagttgtacaattggcagtggattacgtaccgctctgcaaatatgattatgagccaccatttcgtgcaagaacaggttaaggacttcttctatctgacggaagatatcaaattgaagatcgcggatgaaaagaaggaggagaacggcattctgaagtctagctgccagaacaccacctaccgcttgttatccaatcatttcaagggtcagattccgaccaatattctgtccaacctcaataacaccctgatcagctacttcaataaagagaagtccgcttattggaaaggcgaaaaatccctgcgtaattataagaagaacatcccgatgccgttcgaggccagcgttattagcaagttcgtgtatactccagatcgtcgtaactttagctttaaattgtttaaaatcccgtttcgtacctacctgggtaaagaccgcagtgataaaaaaatcatgctggaaaagatcatgaacggtactctgaagctttgcgtgagcaacattcaactggataaaggcaaaatctttctgctggctgcgatccaagttgacaaagaacaacacaccctggacaccagcattattgcggaagcgagcctgtcgattgaacacccgattaccgtaaaaatcggcaaatacgagcacaccatcggtacgaaagaggagtttctgcatcgtcgtctggcgatccaggcggcaatttaccgtgttcaaaaagctgtgaagttcaaccgtggtggtcatggcagcaaacgtaaacgcagatctttggttgattaccagcaccaggaaaagcgctatgtcgagtataagctgcacctgtacagccgtatgctgatcaacctgtgtctaaagtaccaagctgccaccttgttattactgaaccaggaagagaaagaagagattgcgaaagacgacgtgtttttgcttcaaaactggtcctactatagccttaaagaaaagatcgcctataaagcggcgcgcgcaggcatccagatgatcgtggaataaggctccggaagaaggagatatacatatgaataataactataaaatagctatgcaaacgattatcaagaagcagaatcaggacgtcaactttgcgcgtttcaaagagggtgacgagaagggcttggagttcttttacaaacgcttgtacccggcactgtacttctattccttccgctacatcaaagatgatattaacgcagattgtattgtgaacgaggcctttctgcgtttatggctggttagacgtagcattcaggacccggatcacatcgaaccgtttatcaagaagctgaccacccaagcctgcaaagcgtattaccgcaccagcaataaacgcttccagcgtaatatgctgcgtttggacgaaatcgaaaactacgacgagttcatctttggtcatgatccagaaatcgaggaagataccgaagttatttgccaagaggagttggagaacgaactgaaggagaaatggattcgtctcaagacgctgatcccgaatttgacccaggaccaacaactgattgttcgtctttgcctgaagtattcttttaactacgatcgtattgcttggcatattggcggtatttccgattatcaggttgcgcgtaaagtggaaaaaactttggaatcgctgaaggcgattttcaccaattcccagaaactggagatcgtgggcaacaacaatcgtttccgcttcgagggcgacctgaacgaggaacagagctcgatcctgcacatgcgttaccagctgcaatattcttttgaagagatcagcagcgcgctgaacctggaccaaggttatatcaaaaaggtgtttgttggtgctagcatcaagatcaagaaagtcaaaatgtaagtccttaagccaaggagacgtaccatggagacaaaagaacaatttaaaaagactcacctgggtcgtaaaatctctcgtattcgcgagatccgcggtattaagcaggacgcgcttgccatggaattgggcctgagccagcaaaccatttctaagatcgagcaatccgaggacgttgacgacgaaacgctgaataagatctccaaagcgctgggcgttagcagcgatgcaattaagaacttcaacgaggaagctgtggtgaatattatcgcgaacaccgtgaacaaccatgatcagagcgcgagcgtctttatctcgccgaatttcaatccgattgataaaatcgttgaactgtacgaacgtctgttaaagagcgagcaagaaaaaaacgagttgctgaacaagaaataataagaattcctgctgccaccgctgagcaataactagcataaccccttggggcctctaaacgggtcttgaggggttttttgctgaaacctcaggcatttgagaagcacacggtcacactgcttccggtagtcaataaaccggtaaaccagcaatagacataagcggctatttaacgaccctgccctgaaccgacgaccgggtcatcgtggccggatcttgcggcccctcggcttgaacgaattgttagacattatttgccgactaccttggtgatctcgcctttcacgtagtggacaaattcttccaactgatctgcgcgcgaggccaagcgatcttcttcttgtccaagataagcctgtctagcttcaagtatgacgggctgatactgggccggcaggcgctccattgcccagtcggcagcgacatccttcggcgcgattttgccggttactgcgctgtaccaaatgcgggacaacgtaagcactacatttcgctcatcgccagcccagtcgggcggcgagttccatagcgttaaggtttcatttagcgcctcaaatagatcctgttcaggaaccggatcaaagagttcctccgccgctggacctaccaaggcaacgctatgttctcttgcttttgtcagcaagatagccagatcaatgtcgatcgtggctggctcgaagatacctgcaagaatgtcattgcgctgccattctccaaattgcagttcgcgcttagctggataacgccacggaatgatgtcgtcgtgcacaacaatggtgacttctacagcgcggagaatctcgctctctccaggggaagccgaagtttccaaaaggtcgttgatcaaagctcgccgcgttgtttcatcaagccttacggtcaccgtaaccagcaaatcaatatcactgtgtggcttcaggccgccatccactgcggagccgtacaaatgtacggccagcaacgtcggttcgagatggcgctcgatgacgccaactacctctgatagttgagtcgatacttcggcgatcaccgcttccctcatactcttcctttttcaatattattgaagcatttatcagggttattgtctcatgagcggatacatatttgaatgtatttagaaaaataaacaaatagctagctcactcggtcgctacgctccgggcgtgagactgcggcgggcgctgcggacacatacaaagttacccacagattccgtggataagcaggggactaacatgtgaggcaaaacagcagggccgcgccggtggcgtttttccataggctccgccctcctgccagagttcacataaacagacgcttttccggtgcatctgtgggagccgtgaggctcaaccatgaatctgacagtacgggcgaaacccgacaggacttaaagatccccaccgtttccggcgggtcgctccctcttgcgctctcctgttccgaccctgccgtttaccggatacctgttccgcctttctcccttacgggaagtgtggcgctttctcatagctcacacactggtatctcggctcggtgtaggtcgttcgctccaagctgggctgtaagcaagaactccccgttcagcccgactgctgcgccttatccggtaactgttcacttgagtccaacccggaaaagcacggtaaaacgccactggcagcagccattggtaactgggagttcgcagaggatttgtttagctaaacacgcggttgctcttgaagtgtgcgccaaagtccggctacactggaaggacagatttggttgctgtgctctgcgaaagccagttaccacggttaagcagttccccaactgacttaaccttcgatcaaaccacctccccaggtggttttttcgtttacagggcaaaagattacgcgcagaaaaaaaggatctcaagaagatcctttgatcttttctactgaaccgctctagatttcagtgcaatttatctcttcaaatgtagcacctgaagtcagccccatacgatataagttgtaattctcatgttagtcatgccccgcgcccaccggaaggagctgactgggttgaaggctctcaagggcatcggtcgagatcccggtgcctaatgagtgagctaacttacattaattgcgttgcgctcactgcccgctttccagtcgggaaacctgtcgtgccagctgcattaatgaatcggccaacgcgcggggagaggcggtttgcgtattgggcgccagggtggtttttcttttcaccagtgagacgggcaacagctgattgcccttcaccgcctggccctgagagagttgcagcaagcggtccacgctggtttgccccagcaggcgaaaatcctgtttgatggtggttaacggcgggatataacatgagctgtcttcggtatcgtcgtatcccactaccgagatgtccgcaccaacgcgcagcccggactcggtaatggcgcgcattgcgcccagcgccatctgatcgttggcaaccagcatcgcagtgggaacgatgccctcattcagcatttgcatggtttgttgaaaaccggacatggcactccagtcgccttcccgttccgctatcggctgaatttgattgcgagtgagatatttatgccagccagccagacgcagacgcgccgagacagaacttaatgggcccgctaacagcgcgatttgctggtgacccaatgcgaccagatgctccacgcccagtcgcgtaccgtcttcatgggagaaaataatactgttgatgggtgtctggtcagagacatcaagaaataacgccggaacattagtgcaggcagcttccacagcaatggcatcctggtcatccagcggatagttaatgatcagcccactgacgcgttgcgcgagaagattgtgcaccgccgctttacaggcttcgacgccgcttcgttctaccatcgacaccaccacgctggcacccagttgatcggcgcgagatttaatcgccgcgacaatttgcgacggcgcgtgcagggccagactggaggtggcaacgccaatcagcaacgactgtttgcccgccagttgttgtgccacgcggttgggaatgtaattcagctccgccatcgccgcttccactttttcccgcgttttcgcagaaacgtggctggcctggttcaccacgcgggaaacggtctgataagagacaccggcatactctgcgacatcgtataacgttactggtttcac

SEQ ID NO: 5939 - DNA, 6452 bp, synthetic construct
  source 1..6452: mol_type = other DNA
attcaccaccctgaattgactctcttccgggcgctatcatgccataccgcgaaaggttttgcgccattcgatggtgtccgggattgacagctagctcagtcctaggtataatgctagcgtggagatatacctcgagctgaaaaatatcgagggtgcttgtacacccgtagggtgaggtcttggacactcactaaatactcttgtagcatatacaacggcgtgggctcttttacaaagaaaatatgaattggcgacttcattaaatagacccctttaattttgaggatcttgaaaaacacaacttctcaattaattataagaaagaggcggtattattttgtagcatagaatattttagcagaaatctttactcctcgaggcggccgcaaaccaaagtgaatgaaaaacatcaaaaaaaattatgtactatagtacataatttagaaaatatttttatatttgtaaaataagttattgaaatgtaactttgcgatacttcaaagaaatatagaagctattgcttagaatctcgaactgaaaactggtaatttttaatatgcgagaggataagtaaagtagctcacgacctaggcgtgagctcacttatctgcatataaggtataccagtgccccagttcggatatgttgagtttcacgccatttattttgggcaatatgcagtgagatagtgcataaagtggtacagataattcattcggatatctaagcaatttcttttagcaatcaataagctgaaaaataccgcttgcggccgcaataatagactagcataaccccttggggcctctaaacgggtcttgaggggttttttgctgaacgtacgttttacggctagctcagtcctaggtactatgctagcgtggagatatacggtaccaaggaggtaaataatgggagactacaaagaccatgacggtgattataaagatcatgacatcgattacaaggatgacgatgacaagggaggatccggcagcatggaaaaatcaacaatgacgctaactaggaagatccagctgatgattgacctgccgagcgataagaagaatgaaatgtgggaaaaactctaccgctaccagaacctttgctttcgtgcagcgaatctgattgcttcccacctgtacgtccaagagatgatcaaggacttcttctatctgaccgaggagattcaatataaattggcggacgaaaaaaaggacgagatgggtatgtttaacagatccaaaaccggcactaccgcacgtatggtctttgatcgttttaaaggcgaaatcccgaccgacatcctgggttccctgaataacaccattcaaagcaccttcagcaagaacaaagctgactactggcaaggtacgaaaagcgttcgtaactacaagcgcgacattccgattccactgccggtgaaatgtattagcaagatgaaatacgacccggataagaaagcgttttgttttaatatgttcgccattccggttaagacgtacttgggcaaagactataccgacaagcgcgtgaccatggaacgtttgctgaagggtgatattaagttgtgcacgtctcagatccagctgaaggaccgcaaaatcttttggctggcggttttcgagttcaagaaggaggagaaccacctgaaaccggaaatcatcgctgaagcatctttaagcttggaacatccgatcgtggccaaggcgaacaacctgcgtattaacatcggtagcaaggaggagttcctgtaccgtcgtttagccattcaagcgtcgcaaaaacgcattcaagatggtatcgcctatgctcgcagcggtaacggctcaaaacgtaagcagaaagcgctgtacaagactgagaatctcgaaagccgttacgttacccatcgtctccacatgtatagtcgtaagttgatcgatttctgcgttcagcagcaagcaggcacgctgattctgaaaaaccaggaggataagatcggcatcgcgaaagagcaggagttcgtgctgcgcaactggaattattatgaacttcagaccaaaattaaatataaagcggagaaggcgggtatcgaactgatcatcggctaaggctccggaagaaggagatatacatatgaaaaggacaaattcaccacccctaaagcttacggatttccaactgtacaagctgctgaagaagggtaatccgagcagcctggagcacattcatctgcgttataaacgcctgttgttttggattggcaaacagatgctggaagatgatttcgcggttgaaaccttggttcaggacacctttctgaagttatggctgcatcgtgatagcatcgagactccgaaccacatcttgggttttttacgcttcgtgctgaagcgcgactgcatcacgtacttcaacaccccgaaaaacaagttcgctcgtctgaccgcgagcttggagtctttcgagaactatcaagactatatcgtgggttatgatccggttcaagacaaagagcacctgctgcgtcaagaaagcgaccagaaaaactttgatgaggttaataaagttctcaaggtgatttcgccgaagcgtaaatacttgatcgagctgtgtctgcagtacggctttcagtacaaaccgatcgctgaagcaatgggcagctccgtgaaagatattagcaatgaagtcacccgtgcaatcaacgacctgcgcaaaatcctgagagaaaattccaacgacgaaccaccgattaaaagcaaaaagaacgaagtcaagcaaaacgagctctcaggtcaacagattgaaatcatcaagcgccgttttcgtgagaagtcctcgttcgcgattatcgcccgtgagttgaagctctctgaaaaagaagtgcatcaggacttcctgtacgcgtatcagtacctgcaaaaccagaataattctgagattaccatttaagtccttaagccaaggagacgtaccatgaatgaatcactagaggaaatagaaaggtacgttattaaacgtgtcaaagagatccgcgagagcaagaacgtgacccaggaggaactgagcttgtcgatcggcaaaaacattggttttatcagccagattgaagcaccgtctaagaaggctaaatacaatttaatccacctgaatttgatcgcgattgcgctgggttgcagcattaaggacttcctgccggatgaaccgattcgtgataaaaagtatgacatcaaggagatccaaaacaaaaagtcctaataagaattcctgctgccaccgctgagcaataactagcataaccccttggggcctctaaacgggtcttgaggggttttttgctgaaacctcaggcatttgagaagcacacggtcacactgcttccggtagtcaataaaccggtaaaccagcaatagacataagcggctatttaacgaccctgccctgaaccgacgaccgggtcatcgtggccggatcttgcggcccctcggcttgaacgaattgttagacattatttgccgactaccttggtgatctcgcctttcacgtagtggacaaattcttccaactgatctgcgcgcgaggccaagcgatcttcttcttgtccaagataagcctgtctagcttcaagtatgacgggctgatactgggccggcaggcgctccattgcccagtcggcagcgacatccttcggcgcgattttgccggttactgcgctgtaccaaatgcgggacaacgtaagcactacatttcgctcatcgccagcccagtcgggcggcgagttccatagcgttaaggtttcatttagcgcctcaaatagatcctgttcaggaaccggatcaaagagttcctccgccgctggacctaccaaggcaacgctatgttctcttgcttttgtcagcaagatagccagatcaatgtcgatcgtggctggctcgaagatacctgcaagaatgtcattgcgctgccattctccaaattgcagttcgcgcttagctggataacgccacggaatgatgtcgtcgtgcacaacaatggtgacttctacagcgcggagaatctcgctctctccaggggaagccgaagtttccaaaaggtcgttgatcaaagctcgccgcgttgtttcatcaagccttacggtcaccgtaaccagcaaatcaatatcactgtgtggcttcaggccgccatccactgcggagccgtacaaatgtacggccagcaacgtcggttcgagatggcgctcgatgacgccaactacctctgatagttgagtcgatacttcggcgatcaccgcttccctcatactcttcctttttcaatattattgaagcatttatcagggttattgtctcatgagcggatacatatttgaatgtatttagaaaaataaacaaatagctagctcactcggtcgctacgctccgggcgtgagactgcggcgggcgctgcggacacatacaaagttacccacagattccgtggataagcaggggactaacatgtgaggcaaaacagcagggccgcgccggtggcgtttttccataggctccgccctcctgccagagttcacataaacagacgcttttccggtgcatctgtgggagccgtgaggctcaaccatgaatctgacagtacgggcgaaacccgacaggacttaaagatccccaccgtttccggcgggtcgctccctcttgcgctctcctgttccgaccctgccgtttaccggatacctgttccgcctttctcccttacgggaagtgtggcgctttctcatagctcacacactggtatctcggctcggtgtaggtcgttcgctccaagctgggctgtaagcaagaactccccgttcagcccgactgctgcgccttatccggtaactgttcacttgagtccaacccggaaaagcacggtaaaacgccactggcagcagccattggtaactgggagttcgcagaggatttgtttagctaaacacgcggttgctcttgaagtgtgcgccaaagtccggctacactggaaggacagatttggttgctgtgctctgcgaaagccagttaccacggttaagcagttccccaactgacttaaccttcgatcaaaccacctccccaggtggttttttcgtttacagggcaaaagattacgcgcagaaaaaaaggatctcaagaagatcctttgatcttttctactgaaccgctctagatttcagtgcaatttatctcttcaaatgtagcacctgaagtcagccccatacgatataagttgtaattctcatgttagtcatgccccgcgcccaccggaaggagctgactgggttgaaggctctcaagggcatcggtcgagatcccggtgcctaatgagtgagctaacttacattaattgcgttgcgctcactgcccgctttccagtcgggaaacctgtcgtgccagctgcattaatgaatcggccaacgcgcggggagaggcggtttgcgtattgggcgccagggtggtttttcttttcaccagtgagacgggcaacagctgattgcccttcaccgcctggccctgagagagttgcagcaagcggtccacgctggtttgccccagcaggcgaaaatcctgtttgatggtggttaacggcgggatataacatgagctgtcttcggtatcgtcgtatcccactaccgagatgtccgcaccaacgcgcagcccggactcggtaatggcgcgcattgcgcccagcgccatctgatcgttggcaaccagcatcgcagtgggaacgatgccctcattcagcatttgcatggtttgttgaaaaccggacatggcactccagtcgccttcccgttccgctatcggctgaatttgattgcgagtgagatatttatgccagccagccagacgcagacgcgccgagacagaacttaatgggcccgctaacagcgcgatttgctggtgacccaatgcgaccagatgctccacgcccagtcgcgtaccgtcttcatgggagaaaataatactgttgatgggtgtctggtcagagacatcaagaaataacgccggaacattagtgcaggcagcttccacagcaatggcatcctggtcatccagcggatagttaatgatcagcccactgacgcgttgcgcgagaagattgtgcaccgccgctttacaggcttcgacgccgcttcgttctaccatcgacaccaccacgctggcacccagttgatcggcgcgagatttaatcgccgcgacaatttgcgacggcgcgtgcagggccagactggaggtggcaacgccaatcagcaacgactgtttgcccgccagttgttgtgccacgcggttgggaatgtaattcagctccgccatcgccgcttccactttttcccgcgttttcgcagaaacgtggctggcctggttcaccacgcgggaaacggtctgataagagacaccggcatactctgcgacatcgtataacgttactggtttcac

SEQ ID NO: 5940 - DNA, 6369 bp, synthetic construct
  source 1..6369: mol_type = other DNA
attcaccaccctgaattgactctcttccgggcgctatcatgccataccgcgaaaggttttgcgccattcgatggtgtccgggattgacagctagctcagtcctaggtataatgctagcgtggagatatacctcgagaattaaaaatgagggtgcttgtacacccgtaaggtgaggtctcaatggcactcactaaatgcaggcagcatatacaacaaaaaccttccctttttttaggcattgaggtatgaaggatgaagacaactggaattatgatgaacagaaatatttaggcttggtcattgaaaatcaactcctcgaggcggccgccttagccctttctacacctaagatgagtaaaaaaatcaaaaatattgttggtgtatattacaacaaaaaagaaattatttatatctttatccaacaactacaagtacagccttttacgttaaaccataatttcataattgaatttatcatgtaaaattctttgagatttaaaaccaaacctataagaagaaacaaaccaccgtttaatgaattagccatttagtctaggctagaagccagaaagccttccctcaagcataagcctttccctaagtttaacggctttttcgggaaggcctatggtttcataaactaattaaagacaaccaaaaccacagcaaattatgaaaactatactccacaccgctatactcttactatttattagtacagtacctattcgaaaatcccatccaacattaaaaactgttggctgcggccgcaataatagactagcataaccccttggggcctctaaacgggtcttgaggggttttttgctgaacgtacgttttacggctagctcagtcctaggtactatgctagcgtggagatatacggtaccaaggaggtaaataatgggagactacaaagaccatgacggtgattataaagatcatgacatcgattacaaggatgacgatgacaagggaggatccggcagcatgggaaaagaaacaataaagctaactaggaagatccaattgctggtggacgctccgaataaagaggaacgcaaagaggccctggataccctgtaccgctggcagaaccgcagctaccgcgctggcaatctgattgtcacccaccagtacatccaagagatgattaaggactttttctatctgtctgaaggtattcgttatcgcttggtcgatgaaaagaaagcggaagacggcatcctgaaccgttcgaaatccaactgcacgtaccgtgttgttagcgatcgtttcaaaggtgaggtgccgaccaatatcctggcgaatatgaactacaacatcatgaataacttcagcaaaaacttggttcagtaccgccgtggtgaacgttcactggctaatttccgtcgtgatattccattcccgtttggtacgattggcatccatggtctgtcttataagaaggagaagaaagcgttttgttttcgtttgttttcgatcccgttcaaaacctatctgggtaaggactacaccgataagaggtccttgttggagcaggttgtagctggcaacattaagctgtgtaccagcaaaatccaactgaacaagggtaagatttattggctggcggtgtttgaagtggcgaaagagaagcacaacctgaaaccggaagtcatcgccgaggctagcctctctctggagcatccgattattgttaaaagccggaaggcgactctctccatcgggagccgtgaagaatttctgtaccgtcgtttggcgattcaagcagcactgaaacgtgcacagaacgcaaccgcatattgccgtagcggtaagggccgtaaacgtaagaccaaagccgttgaacgattccacgaaaaggagaagaactacgtgagcaaccgtctacatgtttatagccgcaaactcatcgatttctgcatcaagcacgaggcgggcacgttaatcttattgaaccaggaggacaagatggaaattgcgaaagaggacggcttcgtgctgcgtaattggaattactatgaactgatgaccaaaatcaaatacaaagcggagaaggcgggtattgaactgatcgtggactaaggctccggaagaaggagatatacatatggaaagggagtttaagctattaaaagaaggtcacccggacgctatggagttcatctacgcccgttaccaacacaagttgttttggatgggcaaacaacttatcaaggacgagttcgtgatcgagagcattctccaagataccttcctcaagctgtgggaaaagcgcgatcatattgaggacccgaaacacatgctgtacttcctgctgcatgttatgaagcgcgactgcagctattactacattagaccacgtaacaactttcatcgtaatatcaacagcctggataattatgaaaactaccaagagtatattcacggctatgacccggaatcggaagacgagcacctgaaggaccaggaggctaatcagaaagcgctggaccgtattaagtgcgtgtttccgctgttacgaccggaacgtcgttacctgatcgagttgtgtctgaaatatggtttccagtataaaaacatcgcggaactgatgggcacctctactacgtacacctccaacgaggtgaagcgcgcaattgatgatattaagaagatcatccaccagggtagcaatctgggttccaaaccggatcagattcaggtcaaaaagaacacgcgcatcacccgtgaacaggagaaagttctgcagttgcgcaacgagatgcattatagttttgcggcaatcgccgaggaactgcaattgtctcagaaagaggttcacaaagagttcatgaccgcgtacaaattgctgcaaagcaagcacaaacagcaacaaagcgcgtaagtccttaagccaaggagacgtaccatgcaaaatgaaaaggacaaagtagattttcttatccaatttggcagcaatttcggcaaaatccgtaagatgaagaacttatccttccgcgctctgagccagaaatgcgatttggattacgcggacctgaacaagatcgagaaaggtaagcgtaatattacgctgaccaccattgcagaactggcgcgtggtctgaacgtgcacccgaaagagttgtttgacttcgactttaccccgtaataagaattcctgctgccaccgctgagcaataactagcataaccccttggggcctctaaacgggtcttgaggggttttttgctgaaacctcaggcatttgagaagcacacggtcacactgcttccggtagtcaataaaccggtaaaccagcaatagacataagcggctatttaacgaccctgccctgaaccgacgaccgggtcatcgtggccggatcttgcggcccctcggcttgaacgaattgttagacattatttgccgactaccttggtgatctcgcctttcacgtagtggacaaattcttccaactgatctgcgcgcgaggccaagcgatcttcttcttgtccaagataagcctgtctagcttcaagtatgacgggctgatactgggccggcaggcgctccattgcccagtcggcagcgacatccttcggcgcgattttgccggttactgcgctgtaccaaatgcgggacaacgtaagcactacatttcgctcatcgccagcccagtcgggcggcgagttccatagcgttaaggtttcatttagcgcctcaaatagatcctgttcaggaaccggatcaaagagttcctccgccgctggacctaccaaggcaacgctatgttctcttgcttttgtcagcaagatagccagatcaatgtcgatcgtggctggctcgaagatacctgcaagaatgtcattgcgctgccattctccaaattgcagttcgcgcttagctggataacgccacggaatgatgtcgtcgtgcacaacaatggtgacttctacagcgcggagaatctcgctctctccaggggaagccgaagtttccaaaaggtcgttgatcaaagctcgccgcgttgtttcatcaagccttacggtcaccgtaaccagcaaatcaatatcactgtgtggcttcaggccgccatccactgcggagccgtacaaatgtacggccagcaacgtcggttcgagatggcgctcgatgacgccaactacctctgatagttgagtcgatacttcggcgatcaccgcttccctcatactcttcctttttcaatattattgaagcatttatcagggttattgtctcatgagcggatacatatttgaatgtatttagaaaaataaacaaatagctagctcactcggtcgctacgctccgggcgtgagactgcggcgggcgctgcggacacatacaaagttacccacagattccgtggataagcaggggactaacatgtgaggcaaaacagcagggccgcgccggtggcgtttttccataggctccgccctcctgccagagttcacataaacagacgcttttccggtgcatctgtgggagccgtgaggctcaaccatgaatctgacagtacgggcgaaacccgacaggacttaaagatccccaccgtttccggcgggtcgctccctcttgcgctctcctgttccgaccctgccgtttaccggatacctgttccgcctttctcccttacgggaagtgtggcgctttctcatagctcacacactggtatctcggctcggtgtaggtcgttcgctccaagctgggctgtaagcaagaactccccgttcagcccgactgctgcgccttatccggtaactgttcacttgagtccaacccggaaaagcacggtaaaacgccactggcagcagccattggtaactgggagttcgcagaggatttgtttagctaaacacgcggttgctcttgaagtgtgcgccaaagtccggctacactggaaggacagatttggttgctgtgctctgcgaaagccagttaccacggttaagcagttccccaactgacttaaccttcgatcaaaccacctccccaggtggttttttcgtttacagggcaaaagattacgcgcagaaaaaaaggatctcaagaagatcctttgatcttttctactgaaccgctctagatttcagtgcaatttatctcttcaaatgtagcacctgaagtcagccccatacgatataagttgtaattctcatgttagtcatgccccgcgcccaccggaaggagctgactgggttgaaggctctcaagggcatcggtcgagatcccggtgcctaatgagtgagctaacttacattaattgcgttgcgctcactgcccgctttccagtcgggaaacctgtcgtgccagctgcattaatgaatcggccaacgcgcggggagaggcggtttgcgtattgggcgccagggtggtttttcttttcaccagtgagacgggcaacagctgattgcccttcaccgcctggccctgagagagttgcagcaagcggtccacgctggtttgccccagcaggcgaaaatcctgtttgatggtggttaacggcgggatataacatgagctgtcttcggtatcgtcgtatcccactaccgagatgtccgcaccaacgcgcagcccggactcggtaatggcgcgcattgcgcccagcgccatctgatcgttggcaaccagcatcgcagtgggaacgatgccctcattcagcatttgcatggtttgttgaaaaccggacatggcactccagtcgccttcccgttccgctatcggctgaatttgattgcgagtgagatatttatgccagccagccagacgcagacgcgccgagacagaacttaatgggcccgctaacagcgcgatttgctggtgacccaatgcgaccagatgctccacgcccagtcgcgtaccgtcttcatgggagaaaataatactgttgatgggtgtctggtcagagacatcaagaaataacgccggaacattagtgcaggcagcttccacagcaatggcatcctggtcatccagcggatagttaatgatcagcccactgacgcgttgcgcgagaagattgtgcaccgccgctttacaggcttcgacgccgcttcgttctaccatcgacaccaccacgctggcacccagttgatcggcgcgagatttaatcgccgcgacaatttgcgacggcgcgtgcagggccagactggaggtggcaacgccaatcagcaacgactgtttgcccgccagttgttgtgccacgcggttgggaatgtaattcagctccgccatcgccgcttccactttttcccgcgttttcgcagaaacgtggctggcctggttcaccacgcgggaaacggtctgataagagacaccggcatactctgcgacatcgtataacgttactggtttcac

SEQ ID NO: 5941 - DNA, 6436 bp, synthetic construct
  source 1..6436: mol_type = other DNA
attcaccaccctgaattgactctcttccgggcgctatcatgccataccgcgaaaggttttgcgccattcgatggtgtccgggattgacagctagctcagtcctaggtataatgctagcgtggagatatacctcgagaaaaaataacgagggtgcttgtacacccgcagggtgaggtgttgaacactcactaaatactcagtgagtatatacaacggcgtgggctctttttttacttatgttttaaaatacttcaaacgctcattaataaattaaaggattacttcagggtaataacttttatatttaaggctcaaccatctagttgagccttaaatatgaattacaaatgtacttttacagcatctctgttttttaaatacttataaatagcattactcctcgaggcggccgcttgctaacattttatacaaagggcgtaattttatttgcaaattttgttacaagttcttgtaacaaattggaaatttcttatatttgaacaaattagttataaaggtaattttgtgatagtcaaagaaatatagaagctattgctttagattctcgactggaaaactggcacttttcaaaaagcaacgagttattaagtaaatgtgcccacgacctcggcaagggctcacttatcgttgctcggtatgccagtaccaccagtcggtaagttgagttccacgcattctttttggcaatatgtagtgagataatgtttgaatgttgcagataattcatataaagatctaaacaattccttcagcaataatttaattaaaattcgctgtttgcggccgcaataatagactagcataaccccttggggcctctaaacgggtcttgaggggttttttgctgaacgtacgttttacggctagctcagtcctaggtactatgctagcgtggagatatacggtaccaaggaggtaaataatgggagactacaaagaccatgacggtgattataaagatcatgacatcgattacaaggatgacgatgacaagggaggatccggtagcatggaaaaatcaacaatgacgctaactaggcgcatccaactgctcatcgacctgccagcgaacgaacagaaagagatgtgggaaaagttgtaccgttaccagaatcgttgtttccgtgcagcaaattttattgtgagccatctgtacgtacaagagatgattaaggacttcttctatctgaccgaggacatccaatataagctcgctgacgaaaataaagataaaatgggtatttttacccgcagcaagacccacaccaccgctcgcatggtgtttgatcgttttaagggtgaaatcccgacagatattctgggctcgctgaataacaccattcaaagcacctttagcaaaacgaaggcggactactggcagggtacgaaaagcttgcgtaatttcaaaaaggacatcccgattccgctgccggtcaagtgcattagcaaaatgaaatatgatccagaaaagaaggcgtattcttttaacatgtttgccatcccggttaaaacctaccttggcaacgattactccgataaaagagttattatggaacgtttactgcgcgaggagatcaagctgtgcaccagccagattcagctgaaggccggcaaaatctattggctggctgtgttcgagttcgaaaaagaggagcacaaactgaaaccggagatcatcgcggaagcatcgctgagcttggaacacccgattgtcgtgaaggcgaacaacgttcgtattaacattggttccaaggaagagttcctgtaccgtcgtttggcgattcaagcgtcccagaagaggattcaggatggtatcgcgtatacccgttccggtaatggtgttaagcgcaaacagaaggctctgtacaaaaccgagaacctggagtctcgttatgttagtcatcgtttacatttgtatagccgtaagctgatcgacttctgcatccaacagcaggcaggcactttgatcctgaaaaaccaggaggacaagatcggtattgccagagagcaagagttcgtgttgcgcaactggagctattacgagctgcaaacgaaaatcaaatacaaagcggaaaaagcgggcatcgaactgattatcggctaaggctccggaagaaggagatatacatatgaaaagaacaaattcactacccaggaagctgaccaatctgcaactgtacgaattacttaaaaagagcaacccgacggccttggagcatctgcatctccgttataaacgtctgttgttctgggttggttggcaggtgctgaaagacgattttgtcgtggacaccatcgtgcaggatacgtttttgaagctgtggctgcaccgcgacaccatcgaaaccccggatcacattaccggcttcctgcgttttgttatgaaacgtgattgtattagctatgttaccgcaccgcgtaacaaattcaaccgtttaatggcgagcctggacagcttcgagaactaccaggactatctggcgggctacgatccgctgaaggacaaggaatacttgctgagccaagagagcgaccagaagaactttgatgaggttaagaaggtgcttccggttttggacccgaaacgtaaacacctgatcgaactctgcttggaatatggtttccagcataagccaatcgctgaagctatgggtagctccgtgaaggacatcagtaatgaagtcagccgtgcaattaacgatctgcgcaaaattctgaaccgctcctccagcgagcagccgaaaggcaaagcgctggataataagaaacagtctgaaaagctgtcttcgcaacaattagacatcctgaaacgccgtttcgaacaaaagtcctcttttgcggttattgcccaggagctgaaattgcctgaaaaagaggtgcacagagagttcctgtacgcgtaccaacacctccaaaaccagaataccagcgagatcccgctgtaagtccttaagccaaggagacgtaccatggatgtactaaaggacgaaatattaaaaaagtttggtgaacacgtgaaagatttacgtattaaatctggtctgacgcaggatgaggtggttttgaatagcagcaaaatcaccaagggcaccgttagcgatatcgagaacggcaagcgcaacttcgcgtttactaccctgattgacctggctaaaggtctgaacgtctccccgaaggacttgctgaatttcaagatcgactaataagaattcctgctgccaccgctgagcaataactagcataaccccttggggcctctaaacgggtcttgaggggttttttgctgaaacctcaggcatttgagaagcacacggtcacactgcttccggtagtcaataaaccggtaaaccagcaatagacataagcggctatttaacgaccctgccctgaaccgacgaccgggtcatcgtggccggatcttgcggcccctcggcttgaacgaattgttagacattatttgccgactaccttggtgatctcgcctttcacgtagtggacaaattcttccaactgatctgcgcgcgaggccaagcgatcttcttcttgtccaagataagcctgtctagcttcaagtatgacgggctgatactgggccggcaggcgctccattgcccagtcggcagcgacatccttcggcgcgattttgccggttactgcgctgtaccaaatgcgggacaacgtaagcactacatttcgctcatcgccagcccagtcgggcggcgagttccatagcgttaaggtttcatttagcgcctcaaatagatcctgttcaggaaccggatcaaagagttcctccgccgctggacctaccaaggcaacgctatgttctcttgcttttgtcagcaagatagccagatcaatgtcgatcgtggctggctcgaagatacctgcaagaatgtcattgcgctgccattctccaaattgcagttcgcgcttagctggataacgccacggaatgatgtcgtcgtgcacaacaatggtgacttctacagcgcggagaatctcgctctctccaggggaagccgaagtttccaaaaggtcgttgatcaaagctcgccgcgttgtttcatcaagccttacggtcaccgtaaccagcaaatcaatatcactgtgtggcttcaggccgccatccactgcggagccgtacaaatgtacggccagcaacgtcggttcgagatggcgctcgatgacgccaactacctctgatagttgagtcgatacttcggcgatcaccgcttccctcatactcttcctttttcaatattattgaagcatttatcagggttattgtctcatgagcggatacatatttgaatgtatttagaaaaataaacaaatagctagctcactcggtcgctacgctccgggcgtgagactgcggcgggcgctgcggacacatacaaagttacccacagattccgtggataagcaggggactaacatgtgaggcaaaacagcagggccgcgccggtggcgtttttccataggctccgccctcctgccagagttcacataaacagacgcttttccggtgcatctgtgggagccgtgaggctcaaccatgaatctgacagtacgggcgaaacccgacaggacttaaagatccccaccgtttccggcgggtcgctccctcttgcgctctcctgttccgaccctgccgtttaccggatacctgttccgcctttctcccttacgggaagtgtggcgctttctcatagctcacacactggtatctcggctcggtgtaggtcgttcgctccaagctgggctgtaagcaagaactccccgttcagcccgactgctgcgccttatccggtaactgttcacttgagtccaacccggaaaagcacggtaaaacgccactggcagcagccattggtaactgggagttcgcagaggatttgtttagctaaacacgcggttgctcttgaagtgtgcgccaaagtccggctacactggaaggacagatttggttgctgtgctctgcgaaagccagttaccacggttaagcagttccccaactgacttaaccttcgatcaaaccacctccccaggtggttttttcgtttacagggcaaaagattacgcgcagaaaaaaaggatctcaagaagatcctttgatcttttctactgaaccgctctagatttcagtgcaatttatctcttcaaatgtagcacctgaagtcagccccatacgatataagttgtaattctcatgttagtcatgccccgcgcccaccggaaggagctgactgggttgaaggctctcaagggcatcggtcgagatcccggtgcctaatgagtgagctaacttacattaattgcgttgcgctcactgcccgctttccagtcgggaaacctgtcgtgccagctgcattaatgaatcggccaacgcgcggggagaggcggtttgcgtattgggcgccagggtggtttttcttttcaccagtgagacgggcaacagctgattgcccttcaccgcctggccctgagagagttgcagcaagcggtccacgctggtttgccccagcaggcgaaaatcctgtttgatggtggttaacggcgggatataacatgagctgtcttcggtatcgtcgtatcccactaccgagatgtccgcaccaacgcgcagcccggactcggtaatggcgcgcattgcgcccagcgccatctgatcgttggcaaccagcatcgcagtgggaacgatgccctcattcagcatttgcatggtttgttgaaaaccggacatggcactccagtcgccttcccgttccgctatcggctgaatttgattgcgagtgagatatttatgccagccagccagacgcagacgcgccgagacagaacttaatgggcccgctaacagcgcgatttgctggtgacccaatgcgaccagatgctccacgcccagtcgcgtaccgtcttcatgggagaaaataatactgttgatgggtgtctggtcagagacatcaagaaataacgccggaacattagtgcaggcagcttccacagcaatggcatcctggtcatccagcggatagttaatgatcagcccactgacgcgttgcgcgagaagattgtgcaccgccgctttacaggcttcgacgccgcttcgttctaccatcgacaccaccacgctggcacccagttgatcggcgcgagatttaatcgccgcgacaatttgcgacggcgcgtgcagggccagactggaggtggcaacgccaatcagcaacgactgtttgcccgccagttgttgtgccacgcggttgggaatgtaattcagctccgccatcgccgcttccactttttcccgcgttttcgcagaaacgtggctggcctggttcaccacgcgggaaacggtctgataagagacaccggcatactctgcgacatcgtataacgttactggtttcac

SEQ ID NO: 5942 - DNA, 8187 bp, synthetic construct
  source 1..8187: mol_type = other DNA
attcaccaccctgaattgactctcttccgggcgctatcatgccataccgcgaaaggttttgcgccattcgatggtgtccgggattgacagctagctcagtcctaggtataatgctagcgtggagatatacctcgagtaaaaatacaattatgagggtgattgtacacccgtagggtgagtttggttggcaacactcactaaatgcacaggcatatacaacgcgtggcttacttgtttttaataagcgtatcagcaaaaattgcacgaaaaatttcaggattatttttttgacgatttataatctaacgataaggaaactcaatactcctcgaggcggccgctaaattcaaaatatttatcctacatattggatatttaaaaaatatttgtatatttgttttagcgaattgataatgagcctttacaaggcaagttaaaaacgatgttatctcgactcaaaacgaccaattttactatcgagagtatcgtgaaatcgctccatgtctaaaaagttttgtactttcgtacaggcatgggcggttttcacatatgctttaggtagtaactttttaacctttaggttttaaagacgggtttggtcgcccatgagtctaaagtgtgaaaccgctccttgctttttctgcaaagaattgtttacactccagaaacatcgttccataaccacataaaattttatttatgagaacgaaatttgtacataccgccataacgcatccgccttaataaggtgctgaagcttttcctttttactgctcgtgcaccaaaagttatataacagcaacaggctaaacgtgtggtagcagtgtgataatcttctatacacaaatgtcagcgccgtgtataatgtaccaaattgctttggcaccaaatatttagggcattttaacttaaaaactcgcactttaaaagtattgcctttatttgtattttccaaattggaggttgaaataattggggtaatggtgtaggggccttaaaaaggggtggtttttagggaatagaggaagctagtctatgcagttttcattaagtttcattagaaagaacattaagctctgtaatttgtcttaacttttgtcttgatacaaaagttacaaaagatcaagactctattttttcaacggtcaaattcagtcttatttcctaaaagaaataaattattcattctttattatttaatgataatgtattcatgaatctgcgatttcgctgagctcaaacagcatttcttttcacggaaatttcgcctatttgacactcgctgaaaaaataatgtcgtttttaaatcggtaatggttcagcattggggttttgatttgaaagagaataggactataaatcaagcggtatgaggttttgatcgagcgtcgaaacactgcatggagcgtaagcagatcggggagcatagcgacgtttcgatctgggagcttaaaaagtgaatttcgaccgattaaaagatcgccgcaataaaagcacttttggtacttttcgtgcgtgaaaaggacagagaaacctaatgttttaattacgaattatggagaatgaaaaccgaaaggattcattcagtcttttcaagatgacaaactttgcggaaaactagatgcgatgctgcatcaggtgcagcatgacagagtgcatagtcaattgataattgaaaaaaaatgagagatttaagatcatcctgttttgccaattttctttaacttttaccttgatgtaaaagttacaaaagatcaagactttattttttcaacggtcaagtaaagtcttatttcctaaaagaaataaattattcattctttattatttaatgataatgtattcatgaatctgcgatttcgctgcgctcaaacagcatttcttttcacggaaatttcgcctatttgacactcgctgaaaaaataatgtcggttttaaaatacgagtttgttcaatatctgagttttgattgaaagctgaattgtctattaacgatttaatagttaaatcaaataaactattcattctttatgatcttatgatattgtattcatgaatctgcgatttcgcttttcaaagctcaagcagtatttgattttgcactattttcatcgaatcgacgctcactgcgttgtgaatgctcagttttagattttagtaaatagttgcatttaatttttgattgaaaacagaatatactaataaggaggattaaagcgccattagtgaaaaagagatagtttaaccgacgaagagagcgtaagatgatcggggagcgtagcgagtattattttgtttagtttaaaaataagaagagtaggctttttatagagtcttgacctttttggttcgtttttgtgtcaagacaaaaatgaacaatataaattatgaaaggaacctttcaaattataagagaagagtaagagaccgaaacctagttcgactaaaaaaagagtataattaaaatcaccccattgcggccgcaataatagactagcataaccccttggggcctctaaacgggtcttgaggggttttttgctgaacgtacgttttacggctagctcagtcctaggtactatgctagcgtggagatatacggtaccaaggaggtaaataatgggagactacaaagaccatgacggtgattataaagatcatgacatcgattacaaggatgacgatgacaagggaggatccggcagcatggaaaagactacaatgaaactaacgcacaagtttagaatcgttgtcgatctgccaacctacgcagaacgtaaagaggccatggataagctctaccgttggcgtaatcgctgctaccgcgctgcgaacctgatcgtgagccacctgtacgttcaagaaatgctgaaggagttcttctacttgacggagggcgttcaatataaactggcagatgaaaaaaagcatgaggctggcatgctgacgcgttccagaatcaacaccacgtaccgcgcgctgtccgaccgtttcaaaggcgagatgccgatgaatattttgtcttgtctgaataacagcatcatttcgagcttccgcaaggagtctgaagcgtattgcaaaggtgagcgttctatcaaaaactttaaaaaaactatggcatttccgtttggtctggaaggcatcggtggtttctgctacaatgaagagaaacgtaccttttacttccgtttgttttccattccgttccgcatctatttaggtaaaggccgtactgagaagaccaaggtgctgcagcaagttattagcggtgaaatcaagatgtgcagcagccacatcaagattaacgatggtaaagtgttttggctgccggtttttgaaattaagaaggaggagccgaccctgaagccggaaataatcgccgaagcgtccatgagcttcgagtatccgttgatcgtgaaaatcggccgtgcgcgttataccattggcacccaggaggagttcctgtatcgccgtctcgcgattcaggcatcactggaacgtttgcgtgtaggtgcacagtactgccgtagcgacaagggcacccgtcgtaagttgaaagcgaccgaaaaattaaagaaggcggagagcaattacgtcaacaaccgccttcacgtgtattcgaaacgcttgatcgacctgtgtgttgaacataaagctggtactctgattcttgccgaccagcaagagaagatggaagttgcgaaaaccgaggagttcgtgctacgcaactggagctattataacctgatgaccaaaattaagtacaaagctaataaagcgggtattgaactgatcatgtaaggctccggaagaaggagatatacatatgcccgagaggaattttgaactattaaaaaactccgacccggcggcgctggagaaaattcatgcgcagtatcgtcgcctgatcttctgggttggtcgtcgctggattgatgacgactttgtcgtggagaacttggttcaggatacctttttgaagctgtgggaatgtcgtgaaactattaaggacccactgcacattttgtttttcctgaagttcgtaatgaagcgcaactgctacgcacatcacgcgaaaccgcgtaacaaattctttaaaaccaatgttcacagctttgaaagctacgaaaactacgagaactctgtgaccggctacgatccggcggacgccgtgcaagatctgaagggccaggaggaagatcagcaatttttcgaccacttaaacaccgttttgccgcttatccgaccggagcggcgtcatctgattaatctctgcctgaagtatggttttcgttataaagcaatcgcccaggttatgggtaaaggcattatggagacggtgaatgaagtcaaacgtgcgatcgaagacatcaaggtcatcgtggatcgtcgtaaagtgttggagaagaaagacaccggtatggttgaaacggttccgcagaccatcagcgagcgccaatcccaggttttaatgctgagatgcgaaaagaagttcagcttcgctgccatcgcgcaagagctgaacctgtcgcaaaaggaggtgcacgctgagttcatggcagcgtacaaattccgccaacagaatatgaaagagctgctgtaagtccttaagccaaggagacgtaccatgaaaaagataattgattttgaaactacacaattcgattatgacctgattaaccacatcaagggcctgcgtaaaatccatagcattaccaaagaggaactgagcgttaagatgggtgttgccaagtcttttgttggtaatgtggaatccgcgacgcagcgccacaaatacgcaacgcgtcatttgaccctgttagcgaaggcgctgggttttaaaaacatcagcgatttgctcaaattcccgaccccggaatacgacaaaatcaaggtgaccgtcgagcagacctataacgaggctggcaccaaagttattaagtcggaagtggtgaagatcgagccgattgagtaataagaattcctgctgccaccgctgagcaataactagcataaccccttggggcctctaaacgggtcttgaggggttttttgctgaaacctcaggcatttgagaagcacacggtcacactgcttccggtagtcaataaaccggtaaaccagcaatagacataagcggctatttaacgaccctgccctgaaccgacgaccgggtcatcgtggccggatcttgcggcccctcggcttgaacgaattgttagacattatttgccgactaccttggtgatctcgcctttcacgtagtggacaaattcttccaactgatctgcgcgcgaggccaagcgatcttcttcttgtccaagataagcctgtctagcttcaagtatgacgggctgatactgggccggcaggcgctccattgcccagtcggcagcgacatccttcggcgcgattttgccggttactgcgctgtaccaaatgcgggacaacgtaagcactacatttcgctcatcgccagcccagtcgggcggcgagttccatagcgttaaggtttcatttagcgcctcaaatagatcctgttcaggaaccggatcaaagagttcctccgccgctggacctaccaaggcaacgctatgttctcttgcttttgtcagcaagatagccagatcaatgtcgatcgtggctggctcgaagatacctgcaagaatgtcattgcgctgccattctccaaattgcagttcgcgcttagctggataacgccacggaatgatgtcgtcgtgcacaacaatggtgacttctacagcgcggagaatctcgctctctccaggggaagccgaagtttccaaaaggtcgttgatcaaagctcgccgcgttgtttcatcaagccttacggtcaccgtaaccagcaaatcaatatcactgtgtggcttcaggccgccatccactgcggagccgtacaaatgtacggccagcaacgtcggttcgagatggcgctcgatgacgccaactacctctgatagttgagtcgatacttcggcgatcaccgcttccctcatactcttcctttttcaatattattgaagcatttatcagggttattgtctcatgagcggatacatatttgaatgtatttagaaaaataaacaaatagctagctcactcggtcgctacgctccgggcgtgagactgcggcgggcgctgcggacacatacaaagttacccacagattccgtggataagcaggggactaacatgtgaggcaaaacagcagggccgcgccggtggcgtttttccataggctccgccctcctgccagagttcacataaacagacgcttttccggtgcatctgtgggagccgtgaggctcaaccatgaatctgacagtacgggcgaaacccgacaggacttaaagatccccaccgtttccggcgggtcgctccctcttgcgctctcctgttccgaccctgccgtttaccggatacctgttccgcctttctcccttacgggaagtgtggcgctttctcatagctcacacactggtatctcggctcggtgtaggtcgttcgctccaagctgggctgtaagcaagaactccccgttcagcccgactgctgcgccttatccggtaactgttcacttgagtccaacccggaaaagcacggtaaaacgccactggcagcagccattggtaactgggagttcgcagaggatttgtttagctaaacacgcggttgctcttgaagtgtgcgccaaagtccggctacactggaaggacagatttggttgctgtgctctgcgaaagccagttaccacggttaagcagttccccaactgacttaaccttcgatcaaaccacctccccaggtggttttttcgtttacagggcaaaagattacgcgcagaaaaaaaggatctcaagaagatcctttgatcttttctactgaaccgctctagatttcagtgcaatttatctcttcaaatgtagcacctgaagtcagccccatacgatataagttgtaattctcatgttagtcatgccccgcgcccaccggaaggagctgactgggttgaaggctctcaagggcatcggtcgagatcccggtgcctaatgagtgagctaacttacattaattgcgttgcgctcactgcccgctttccagtcgggaaacctgtcgtgccagctgcattaatgaatcggccaacgcgcggggagaggcggtttgcgtattgggcgccagggtggtttttcttttcaccagtgagacgggcaacagctgattgcccttcaccgcctggccctgagagagttgcagcaagcggtccacgctggtttgccccagcaggcgaaaatcctgtttgatggtggttaacggcgggatataacatgagctgtcttcggtatcgtcgtatcccactaccgagatgtccgcaccaacgcgcagcccggactcggtaatggcgcgcattgcgcccagcgccatctgatcgttggcaaccagcatcgcagtgggaacgatgccctcattcagcatttgcatggtttgttgaaaaccggacatggcactccagtcgccttcccgttccgctatcggctgaatttgattgcgagtgagatatttatgccagccagccagacgcagacgcgccgagacagaacttaatgggcccgctaacagcgcgatttgctggtgacccaatgcgaccagatgctccacgcccagtcgcgtaccgtcttcatgggagaaaataatactgttgatgggtgtctggtcagagacatcaagaaataacgccggaacattagtgcaggcagcttccacagcaatggcatcctggtcatccagcggatagttaatgatcagcccactgacgcgttgcgcgagaagattgtgcaccgccgctttacaggcttcgacgccgcttcgttctaccatcgacaccaccacgctggcacccagttgatcggcgcgagatttaatcgccgcgacaatttgcgacggcgcgtgcagggccagactggaggtggcaacgccaatcagcaacgactgtttgcccgccagttgttgtgccacgcggttgggaatgtaattcagctccgccatcgccgcttccactttttcccgcgttttcgcagaaacgtggctggcctggttcaccacgcgggaaacggtctgataagagacaccggcatactctgcgacatcgtataacgttactggtttcac

SEQ ID NO: 5943 - DNA, 6842 bp, synthetic construct
  source 1..6842: mol_type = other DNA
attcaccaccctgaattgactctcttccgggcgctatcatgccataccgcgaaaggttttgcgccattcgatggtgtccgggattgacagctagctcagtcctaggtataatgctagcgtggagatatacctcgagcaattagattttgagggtgcttgtacacccatagggtgaggttaagaattacactcactaagtgtgaacaacacatacaacttgtgggatatacgctaacaatagcaatcaataagcctaaatacgggcacctaaatacaatatgggacaaacaccgataaagtttttttgaacgattgaaaatggatacttttaatgaagtgtccagaaatcgtcaaatattagatagaacccttgggatattgcttctccttataggtatcgcaattgggattttccttattcctgattttttaccactacttaaaaggactccttatttattgctcgaacccgatgcaggtgtaagacatgagcttggatacgcttggtttatgcaatcaattggttggatcattgcttttttcgcatttaggagcagtagggcatttttaagggatagcaagaaaccaactagtaccagtaattaaatcaaaggtgaaagaggtatatagttgcctaaacaccatatacaactcactgaaaaaccgctccgaaacgcaatattctgtgatgacagccattcatccggtaggctaaagtatgtaaaaagaagctaatgtcatcttcccttttctcctcgaggcggccgcaaatgaaaaaattacaagaagtttttttgagagcgttcgctctcatttaggggtttttattatatttatccctgaaataacatatttgcgaaacttgttaagttaataatattagaagcattcgctttgattctcgcatcaaaaactggtaatttttaacgacgagatgataagtgcaaatgctcacggcccgggcgtgagcttacttattgtcgtgcggtataccagtaccttgatgctataggttaagttttcacgccctctttatcttatttaaaaagggctttctcaacttttcaaagctatcttctctttatccttttttaagaaatcgcatcagctttaaaagcataatcaattttaaccatggtgcattgaccatcttaaacgaggcctgttgcggccgcaataatagactagcataaccccttggggcctctaaacgggtcttgaggggttttttgctgaacgtacgttttacggctagctcagtcctaggtactatgctagcgtggagatatacggtaccaaggaggtaaataatgggaaaatcaacactaaagcacactaggaagattcagatcttgatcgacctgccgacgaaagacgagaagaaagaggttatggatatgatgtatcagtggcgtgatcgttgcttccgcgcagcgaacattatcgtgacccatctgtacgttcaggagatgatcaaggacttcttttatctgagcgaaggtattaagtacaaactcgcggatgagaaaaaagacgaaaagggcatcctgcaacgtagccgtatgaacaccacctatcgcgtggtgagcgaccgttttaagggcgagatgccgacgaatatcctttccaccctgaaccacggcctgatcagcagctttaacaaaaaccgcgtccagtattggaaaggcgaacgtagcctgccaaatttcaaaaaggacatggcattcccgtttggtctgcaaggtatctctcgtctggtgtatgatgaagaaaaaaaggcgttctgctttagattgtaccgcgttccgtttaaaacgtacttgggtaaggacttcaccgataaacgcatgctgctggagcgcctagtcaaaggagacgttaagctgtgtgcgtcgaacattcaactgaatggtggtaagatcttttggctggctgtattcgaaattgaaaaggagaagcacagcctcaaaccggaagtgattgccgaagcttcgctctccttggagtatccgattgttgtgaagactggtaagaaccgtctgaccattggtactaaagaagagttcctgtaccgcagattggcgattcaagcggcgcgtcgtcgtacccaggttggtgcaacctacagccgttctggtaagggtaagaagcgcaaattaaaagccgtcgataaataccataaaacggaatcaaactatgtggcgcatcgtattcacgtttacagccgtaagttaatcgatttctgcattaaacaccaagcgggcaccctgatccttatgaatcaggaggacaaagttggcatcgccaaagaggaggagttcgtgctgcgtaattggtcctattacgaactgatgaccaaaatcaagtacaaagctgagaaggctggcatcgaattgattatcggctaaggctccggaagaaggagatatacatatgggagactacaaagaccatgacggtgattataaagatcatgacatcgattacaaggatgacgatgacaagggaggatccggcagcatgttatattcagattttgaattgctaaaaattggcgacactagtgcgttggaccatatccatgcaaaatactttcgttccatcctgtggatcggccgtcagtggctgaacgatgattttttgatcgagtctctggttcaggatacgtttctaaagctgtgggttaatagagataagctggaaagcccggaacacattttttacttcttgcgtttcgtgatgaagcgcgagtgcattagctattaccgtaaaccaaaatacaaatttcataaaaaagtgaacagcttggaggattacgacaactatcaggactatatggtgggttatgatccggttaacgactctgagaacctggacgaacaagaaagcacccagaaatccttcgaccacattaaatcgattcttccgctgctgaatgcggataagcgccatctgatcgagttatgtctgaagtacggtttccaatataaggcgatcagcaaagttatgggtaaaggtattcacgaaaccagccgtgaaatcaaagaagccatcgaggacatcaagaccattgtccacaagggcaacgagctcggcagcaatgacaccatgaccaatgaaatcaagtttagcggtgaattatccgaggaacaggctaaggtgctgaagatgcgctgcgatttgaagtacagcttctctgagattgccaaggagctggaactgtccgagaaagaggtacaccaagagttcatgaaggcatataaactgatgaaagcgaaccaccagttgcaactgcaaagcgcgtaagtccttaagccaaggagacgtaccatgctaatggctgataagaacacaaataaatcgaaggtctatttcagcgataaatacgtgtgcaagttcatcagcgaagagtggctgaccagcaaggacacctccgcgcgtaaatacggtaaaatctacggcgtgaactaccatgttattgaaaagatccagcaagagaatggttataacattccgctgagcaccctgtctacgatttgttttaaccacggcatcaaattgtccgacttctttaaattggttgagaagaagtacggtgaatttctgaatgatagctatgagtataaataataagaattcctgctgccaccgctgagcaataactagcataaccccttggggcctctaaacgggtcttgaggggttttttgctgaaacctcaggcatttgagaagcacacggtcacactgcttccggtagtcaataaaccggtaaaccagcaatagacataagcggctatttaacgaccctgccctgaaccgacgaccgggtcatcgtggccggatcttgcggcccctcggcttgaacgaattgttagacattatttgccgactaccttggtgatctcgcctttcacgtagtggacaaattcttccaactgatctgcgcgcgaggccaagcgatcttcttcttgtccaagataagcctgtctagcttcaagtatgacgggctgatactgggccggcaggcgctccattgcccagtcggcagcgacatccttcggcgcgattttgccggttactgcgctgtaccaaatgcgggacaacgtaagcactacatttcgctcatcgccagcccagtcgggcggcgagttccatagcgttaaggtttcatttagcgcctcaaatagatcctgttcaggaaccggatcaaagagttcctccgccgctggacctaccaaggcaacgctatgttctcttgcttttgtcagcaagatagccagatcaatgtcgatcgtggctggctcgaagatacctgcaagaatgtcattgcgctgccattctccaaattgcagttcgcgcttagctggataacgccacggaatgatgtcgtcgtgcacaacaatggtgacttctacagcgcggagaatctcgctctctccaggggaagccgaagtttccaaaaggtcgttgatcaaagctcgccgcgttgtttcatcaagccttacggtcaccgtaaccagcaaatcaatatcactgtgtggcttcaggccgccatccactgcggagccgtacaaatgtacggccagcaacgtcggttcgagatggcgctcgatgacgccaactacctctgatagttgagtcgatacttcggcgatcaccgcttccctcatactcttcctttttcaatattattgaagcatttatcagggttattgtctcatgagcggatacatatttgaatgtatttagaaaaataaacaaatagctagctcactcggtcgctacgctccgggcgtgagactgcggcgggcgctgcggacacatacaaagttacccacagattccgtggataagcaggggactaacatgtgaggcaaaacagcagggccgcgccggtggcgtttttccataggctccgccctcctgccagagttcacataaacagacgcttttccggtgcatctgtgggagccgtgaggctcaaccatgaatctgacagtacgggcgaaacccgacaggacttaaagatccccaccgtttccggcgggtcgctccctcttgcgctctcctgttccgaccctgccgtttaccggatacctgttccgcctttctcccttacgggaagtgtggcgctttctcatagctcacacactggtatctcggctcggtgtaggtcgttcgctccaagctgggctgtaagcaagaactccccgttcagcccgactgctgcgccttatccggtaactgttcacttgagtccaacccggaaaagcacggtaaaacgccactggcagcagccattggtaactgggagttcgcagaggatttgtttagctaaacacgcggttgctcttgaagtgtgcgccaaagtccggctacactggaaggacagatttggttgctgtgctctgcgaaagccagttaccacggttaagcagttccccaactgacttaaccttcgatcaaaccacctccccaggtggttttttcgtttacagggcaaaagattacgcgcagaaaaaaaggatctcaagaagatcctttgatcttttctactgaaccgctctagatttcagtgcaatttatctcttcaaatgtagcacctgaagtcagccccatacgatataagttgtaattctcatgttagtcatgccccgcgcccaccggaaggagctgactgggttgaaggctctcaagggcatcggtcgagatcccggtgcctaatgagtgagctaacttacattaattgcgttgcgctcactgcccgctttccagtcgggaaacctgtcgtgccagctgcattaatgaatcggccaacgcgcggggagaggcggtttgcgtattgggcgccagggtggtttttcttttcaccagtgagacgggcaacagctgattgcccttcaccgcctggccctgagagagttgcagcaagcggtccacgctggtttgccccagcaggcgaaaatcctgtttgatggtggttaacggcgggatataacatgagctgtcttcggtatcgtcgtatcccactaccgagatgtccgcaccaacgcgcagcccggactcggtaatggcgcgcattgcgcccagcgccatctgatcgttggcaaccagcatcgcagtgggaacgatgccctcattcagcatttgcatggtttgttgaaaaccggacatggcactccagtcgccttcccgttccgctatcggctgaatttgattgcgagtgagatatttatgccagccagccagacgcagacgcgccgagacagaacttaatgggcccgctaacagcgcgatttgctggtgacccaatgcgaccagatgctccacgcccagtcgcgtaccgtcttcatgggagaaaataatactgttgatgggtgtctggtcagagacatcaagaaataacgccggaacattagtgcaggcagcttccacagcaatggcatcctggtcatccagcggatagttaatgatcagcccactgacgcgttgcgcgagaagattgtgcaccgccgctttacaggcttcgacgccgcttcgttctaccatcgacaccaccacgctggcacccagttgatcggcgcgagatttaatcgccgcgacaatttgcgacggcgcgtgcagggccagactggaggtggcaacgccaatcagcaacgactgtttgcccgccagttgttgtgccacgcggttgggaatgtaattcagctccgccatcgccgcttccactttttcccgcgttttcgcagaaacgtggctggcctggttcaccacgcgggaaacggtctgataagagacaccggcatactctgcgacatcgtataacgttactggtttcac

SEQ ID NO: 5944 - DNA, 6375 bp, synthetic construct
  source 1..6375: mol_type = other DNA
attcaccaccctgaattgactctcttccgggcgctatcatgccataccgcgaaaggttttgcgccattcgatggtgtccgggattgacagctagctcagtcctaggtataatgctagcgtggagatatacctcgagatagaatggtcgagggtgcttgtacacccgtaaggtgaggtcaagacactcactaaatgcagactgcatgtacaacgcgtgggctctcttattatttgtaatctttagtttaagcttttaaattactaccttttatactgatagtacgctggcttttttccgttcagtttgtcattcagcgttggcaaagacatactcttttgcaatttttggcttgtgtgttggctgtagcgaattgcaaatgtgtatggctctcctcgaggcggccgcaacttaaagatatcgataaatttctttcgctttcccctttttggtaaaatacaggctcatactggtaatttacaatcggtaatggtgggttacacctttcaacacgactaatttaagcgaaaatttcagcttggaaaaattccaaactaaagaataaggcttcatcaacaccaaggagtgcaaaagaacaaacacgcggccgcaataatagactagcataaccccttggggcctctaaacgggtcttgaggggttttttgctgaacgtacgttttacggctagctcagtcctaggtactatgctagcgtggagatatacggtaccaaggaggtaaataatggaaaagactacattaaaactaacgaggaagatccaactgttaatcgacctgtctaccaaagaggagaaaaaggaggcactggacaaactgtaccagtggcaaaaccgctgcttccgtgcggcaaatctgattgttacgcatctgtacgtacaggagatgattcgcgagttcttttatctgagtgaaggtaagaagtataaactggcggatgaaaagaaggacgagcagggtattctcaaccgtagccgtattaataccacctaccgcgtggtaagcgatagattcaagggtgaaatcccgaccaacattttgtctaacctgaaccaggcgctgatcagcagctttaaaaagaaccgtccagaatactggaatggtgaacgctccttgaagaacttcagacgtgatatggcatttccgttcgacttggaaggcatgtccggtcttcactataacgaagagaaaaaagcgttctgtttccggttgtttcgcatcccgtttaaaacttacctgggcaaggacttcaccgataaacgtaccctgttagagcgcgttgttgaaggtaaaacgaagctttgcacgagccatattaaactgaaggagggtaagatttttctgctggcggtttttgaaatcgagaaggagaatcacgatttgcgcccggagatcatcgccgaagcttccctgtcgttggagtacccgattgtggttaaggtcggcaaggcgcgtttgaccattggcaccaaagaagagttcctgtaccgccgtcttgcgatccaaagcgcccaccgtcgcgctaaaatcggcgcaacctatagcaaatcgggtaaaggcattaaacgtaaattgaaggctgtggatcgtctgggccagaccgaacgtaaatacgtgcatcataggttgcacgtttattctcgtcgtctgatcgacttttgcgtgaaacaccgcgctggaacgctgattctgctgaaccaagaagagaaaactgaaatcgcgaaggaggagggtttcgtgctccgtaattggagctattgtgatctgatgaccaaaatcgagtacaaggccaagaaggcgggtctggagctaattatcgactaaggctccggaagaaggagatatacatatgggagactacaaagaccatgacggtgattataaagatcatgacatcgattacaaggatgacgatgacaagggaggatccggcagcatggaaaatcatcacacactagaggaatgttacaaaggcctgaagaaaggctgcagcaattccttcactgagatccacaccaaatacaatcgccagatcttttggctgggtaaaagctttctcgacgacggctttgtagttgaaaccttggttcaggatgtttttttgaagctttgggttcatcgtgataccctggagtctccgaagcacatctatttcttcctgcgtttcgtgatgaagcgcgagtgcatttcttactacacgcgtccgaagaaccgcttcttccgcaaagtccacagcttggagtccttcgagaactaccaggactacatggtgggttatgatccggcagaggacaacaataacgtgaaactgcaggagggtgaacaagagaaatttgagtcgattaagagcgtcctgccactgctggacgacagcaaacgtcatgttattaacctgtgcctgaagtacggcttccaatataaagcgatttccaaggctatgggtaagggcatcaacgaaacctgtcgtgaaatcaaggaggcgatcgaagatattaagaccattctgcatcaaggtaataaattggactttggtgacaacaacaccgatgagatcaagttcacgggtgaaatgaccgaggaacagaccaaggtgctgaagatgcgttgtgaactgcgttatagcttcagcgaaatcgcggatgaattgaatatttctcagaaagaggtgcaccaagaatttatgatcgcgtatcgtctgatggaagccaaacaccagctgcaaagcgcataagtccttaagccaaggagacgtaccatgactacagatacgaaaacaaatcacataggccgtaaaatcgcgcgtattcgcgaattgcgcggtatgaaacaagaaaccttggcggaagagttaggcatctcccagcaatcggtgtctagcctggagaagagcgaaacgttggaggacaagaagctggaggagatcgccaaagcgctgggtgttaccaaagaaggtatcgagaacttctccgaagagagcgtcctgaacattatctcaaatagcttccacgatcaatctgcgctgaatgcaattctgcatcagccgacctttaacccgattgataaggtggttgaactgtatgaacgtctggtgcaggctgaaaaggacaaagttagctacctggaggagttgctgaaaaagaagtaataagaattcctgctgccaccgctgagcaataactagcataaccccttggggcctctaaacgggtcttgaggggttttttgctgaaacctcaggcatttgagaagcacacggtcacactgcttccggtagtcaataaaccggtaaaccagcaatagacataagcggctatttaacgaccctgccctgaaccgacgaccgggtcatcgtggccggatcttgcggcccctcggcttgaacgaattgttagacattatttgccgactaccttggtgatctcgcctttcacgtagtggacaaattcttccaactgatctgcgcgcgaggccaagcgatcttcttcttgtccaagataagcctgtctagcttcaagtatgacgggctgatactgggccggcaggcgctccattgcccagtcggcagcgacatccttcggcgcgattttgccggttactgcgctgtaccaaatgcgggacaacgtaagcactacatttcgctcatcgccagcccagtcgggcggcgagttccatagcgttaaggtttcatttagcgcctcaaatagatcctgttcaggaaccggatcaaagagttcctccgccgctggacctaccaaggcaacgctatgttctcttgcttttgtcagcaagatagccagatcaatgtcgatcgtggctggctcgaagatacctgcaagaatgtcattgcgctgccattctccaaattgcagttcgcgcttagctggataacgccacggaatgatgtcgtcgtgcacaacaatggtgacttctacagcgcggagaatctcgctctctccaggggaagccgaagtttccaaaaggtcgttgatcaaagctcgccgcgttgtttcatcaagccttacggtcaccgtaaccagcaaatcaatatcactgtgtggcttcaggccgccatccactgcggagccgtacaaatgtacggccagcaacgtcggttcgagatggcgctcgatgacgccaactacctctgatagttgagtcgatacttcggcgatcaccgcttccctcatactcttcctttttcaatattattgaagcatttatcagggttattgtctcatgagcggatacatatttgaatgtatttagaaaaataaacaaatagctagctcactcggtcgctacgctccgggcgtgagactgcggcgggcgctgcggacacatacaaagttacccacagattccgtggataagcaggggactaacatgtgaggcaaaacagcagggccgcgccggtggcgtttttccataggctccgccctcctgccagagttcacataaacagacgcttttccggtgcatctgtgggagccgtgaggctcaaccatgaatctgacagtacgggcgaaacccgacaggacttaaagatccccaccgtttccggcgggtcgctccctcttgcgctctcctgttccgaccctgccgtttaccggatacctgttccgcctttctcccttacgggaagtgtggcgctttctcatagctcacacactggtatctcggctcggtgtaggtcgttcgctccaagctgggctgtaagcaagaactccccgttcagcccgactgctgcgccttatccggtaactgttcacttgagtccaacccggaaaagcacggtaaaacgccactggcagcagccattggtaactgggagttcgcagaggatttgtttagctaaacacgcggttgctcttgaagtgtgcgccaaagtccggctacactggaaggacagatttggttgctgtgctctgcgaaagccagttaccacggttaagcagttccccaactgacttaaccttcgatcaaaccacctccccaggtggttttttcgtttacagggcaaaagattacgcgcagaaaaaaaggatctcaagaagatcctttgatcttttctactgaaccgctctagatttcagtgcaatttatctcttcaaatgtagcacctgaagtcagccccatacgatataagttgtaattctcatgttagtcatgccccgcgcccaccggaaggagctgactgggttgaaggctctcaagggcatcggtcgagatcccggtgcctaatgagtgagctaacttacattaattgcgttgcgctcactgcccgctttccagtcgggaaacctgtcgtgccagctgcattaatgaatcggccaacgcgcggggagaggcggtttgcgtattgggcgccagggtggtttttcttttcaccagtgagacgggcaacagctgattgcccttcaccgcctggccctgagagagttgcagcaagcggtccacgctggtttgccccagcaggcgaaaatcctgtttgatggtggttaacggcgggatataacatgagctgtcttcggtatcgtcgtatcccactaccgagatgtccgcaccaacgcgcagcccggactcggtaatggcgcgcattgcgcccagcgccatctgatcgttggcaaccagcatcgcagtgggaacgatgccctcattcagcatttgcatggtttgttgaaaaccggacatggcactccagtcgccttcccgttccgctatcggctgaatttgattgcgagtgagatatttatgccagccagccagacgcagacgcgccgagacagaacttaatgggcccgctaacagcgcgatttgctggtgacccaatgcgaccagatgctccacgcccagtcgcgtaccgtcttcatgggagaaaataatactgttgatgggtgtctggtcagagacatcaagaaataacgccggaacattagtgcaggcagcttccacagcaatggcatcctggtcatccagcggatagttaatgatcagcccactgacgcgttgcgcgagaagattgtgcaccgccgctttacaggcttcgacgccgcttcgttctaccatcgacaccaccacgctggcacccagttgatcggcgcgagatttaatcgccgcgacaatttgcgacggcgcgtgcagggccagactggaggtggcaacgccaatcagcaacgactgtttgcccgccagttgttgtgccacgcggttgggaatgtaattcagctccgccatcgccgcttccactttttcccgcgttttcgcagaaacgtggctggcctggttcaccacgcgggaaacggtctgataagagacaccggcatactctgcgacatcgtataacgttactggtttcac

SEQ ID NO: 5945 - DNA, 6674 bp, synthetic construct
  source 1..6674: mol_type = other DNA
attcaccaccctgaattgactctcttccgggcgctatcatgccataccgcgaaaggttttgcgccattcgatggtgtccgggattgacagctagctcagtcctaggtataatgctagcgtggagatatacctcgagacctattgattgactttatgatcagagggtgcttgtacacccgtaaagtgaggtcgcgggcactcaccaaatgcaggaagcatatacaacggcgtgttcatctacacttagaaaacaagagcttttttgtgaggcatataaaataaacaatgttgaattttcaatctagaattttaaatagaatctgagggtacttgtatacccgtagggtgaggctttggcactcactaagtagcatacagcttatatacaatggcgtgagttaattatctttaaaccgttttaaaatgattgtacacaaaaggtcctagttttatccagccttaatactattaaaaattatcccttgataaactacacgttgggttaattgtaaaagttggtttaggttccgaatgaagtgtaatcaacagcttatttttaaagaaaacctcctcgaggcggccgcaaaaactgtagtcttatgagactacattcaaatatttgtttatatttacctcataattatatatttgcgaaacttctttaagtaacatattagaagcattcgctttgaatctcgaatcgaaaactggtaatttttagtacacgagaggataagcagggatgctcacgacccgggcgtgggctctcacttattgtgtacaggtataccagtgccacgattcgataagttgagacctgcgccttttctttattctcagaacatctcaacattcaagccgtgtttcttccttaatgaaggcgagcagccacaccccaatttcgaaattggcaacttgccgggtacccctatgcctacaagcaagccaaaaaaacccttaaataaatgcttatgtaagaattaaaacgggttaagagcggccgcaataatagactagcataaccccttggggcctctaaacgggtcttgaggggttttttgctgaacgtacgttttacggctagctcagtcctaggtactatgctagcgtggagatatacggtaccaaggaggtaaataatgatgaaaaataagactctatcattaacaagaaagatccaactgaaggtggatctgccgacctacgaggagcgcaaagaggcgattggcaaactataccagtggcagaatcgctgtttcaaggcggccaatattattgttactcatctgtactgccaggagatgattaaagagttcttttacttgacggaagacatccaatataagttggccgaccagaaaaaggacgaaaacggcattctgaaccgctcacgtattaacaccacctaccgcgtcatcgccgaccgttttaaaggcgagatcccgatggaaatcttatctaacctgaaccgtaaccttgagtccagctttaacaaaaacaagccgaaatattggaaaggcgaacgctccctcaagaacttccgccgcgacatcggctttccgttcccggcacgttgcatgtggggtttcaagcacgacccggaacgtaatgcattttgcttccgtctgtttcagatcccgttctgcacctacctgggtcgagacttcagcgataaacgtagcttgctgcatcgtgcggtgaagggtgaggttcgtttgcgcaccagcgaaattaaactgaccgataccaagatcttctggctggcggtatttgatatcgagcaggagcagcatgcactgaagccggaagtcatcgcggaagcgagcctgtcgttggagcacccaatcagcgttaaggtgggtggtaatcgtttgaacatcggtaacaaggaggagttcctgtacagaagactcgcgattcaagctgcgcgtaagcgcgcactggctggcaccgttaattctcgtggtggccatggtcgtacccgtaaactgaaggcggtggaaaaatacaaagacaaagaaaccaagtacgttaatcaacgtctgcacgtgtatagccgtcgcttaattgatttctgtgttaaacaccaggcgggtacactgattctgctgcaccaagaggacaaaatcgaagccgctaaagagaaccaatttgttctgcgtaactggaattattatgaactgacgaagaagattgaatataaagcaaaaaaggctggcatcgagctggtgattgattaaggctccggaagaaggagatatacatatgggagactacaaagaccatgacggtgattataaagatcatgacatcgattacaaggatgacgatgacaagggaggatccggcagcatgaaaaggacagcagctgataagcactatacgggtttcaagcacggttgtccggttgctctgaaggcaatttacacccagtaccaccgccaaatctactggatgggtcgtagcctgattaaggacgtttttgtcgtggaaaccttggttcaggataccttcctgaccctgtgggaaaaacgtgagagcattgaatccccgcagcacctggttaattttctgtacacggtgatctctaacgagtgcaaatggtattacgcgcgtccgaaaaaccagtttaaccgcgagtgctatgcgcttgagaaaatggaaaactatcagagcttcatgctgggctatgatccgaccgcagttgatattcatttggaagaccagcaacagcaacaacgtgagtatgagcaggttatcaaggtgttaccgctgctgggcggtcagcgtcagcgcctgatcgagctttgcctgcagcacggcttcaagtacaagatcatctctgaacaactgggcatttcgatcaaggaggcgagcaccactttaaaattgaccattgacgaaattaagaacattctgcatcagggctacgtgctgcaaccacaagagacggaaccgatgcagaatggtgaaggtcaaatgaccgagcaagaggcgcgcgtgctggctctgcgttgtgaacagcagtacagcttcgcccagatcgccaatgagctgcaaatctcccagaaagaagttcatcgtgcgtttaccgcggcatataaattgttgcaacaacacgaacatctccaaagcgcataagtccttaagccaaggagacgtaccatgctaaggttctttacatttatagctaattaccagtttgacatgaacgaagatcaaaaacgccgtctgctgattgagttcggcaagatcgtgaaattccaccgcaccgaaaagctgaaaatctccctgcgtgatttagctaaaaagtgcgatgttgagcacagcgcaattggtaagatcgagaagggtgaaattaaaattcagctgccgacggtctttgaattggcgaagggcctggagatccatccgcgtgacctgtttgacttcgacttcccgttggaggaaaccggtaattaataagaattcctgctgccaccgctgagcaataactagcataaccccttggggcctctaaacgggtcttgaggggttttttgctgaaacctcaggcatttgagaagcacacggtcacactgcttccggtagtcaataaaccggtaaaccagcaatagacataagcggctatttaacgaccctgccctgaaccgacgaccgggtcatcgtggccggatcttgcggcccctcggcttgaacgaattgttagacattatttgccgactaccttggtgatctcgcctttcacgtagtggacaaattcttccaactgatctgcgcgcgaggccaagcgatcttcttcttgtccaagataagcctgtctagcttcaagtatgacgggctgatactgggccggcaggcgctccattgcccagtcggcagcgacatccttcggcgcgattttgccggttactgcgctgtaccaaatgcgggacaacgtaagcactacatttcgctcatcgccagcccagtcgggcggcgagttccatagcgttaaggtttcatttagcgcctcaaatagatcctgttcaggaaccggatcaaagagttcctccgccgctggacctaccaaggcaacgctatgttctcttgcttttgtcagcaagatagccagatcaatgtcgatcgtggctggctcgaagatacctgcaagaatgtcattgcgctgccattctccaaattgcagttcgcgcttagctggataacgccacggaatgatgtcgtcgtgcacaacaatggtgacttctacagcgcggagaatctcgctctctccaggggaagccgaagtttccaaaaggtcgttgatcaaagctcgccgcgttgtttcatcaagccttacggtcaccgtaaccagcaaatcaatatcactgtgtggcttcaggccgccatccactgcggagccgtacaaatgtacggccagcaacgtcggttcgagatggcgctcgatgacgccaactacctctgatagttgagtcgatacttcggcgatcaccgcttccctcatactcttcctttttcaatattattgaagcatttatcagggttattgtctcatgagcggatacatatttgaatgtatttagaaaaataaacaaatagctagctcactcggtcgctacgctccgggcgtgagactgcggcgggcgctgcggacacatacaaagttacccacagattccgtggataagcaggggactaacatgtgaggcaaaacagcagggccgcgccggtggcgtttttccataggctccgccctcctgccagagttcacataaacagacgcttttccggtgcatctgtgggagccgtgaggctcaaccatgaatctgacagtacgggcgaaacccgacaggacttaaagatccccaccgtttccggcgggtcgctccctcttgcgctctcctgttccgaccctgccgtttaccggatacctgttccgcctttctcccttacgggaagtgtggcgctttctcatagctcacacactggtatctcggctcggtgtaggtcgttcgctccaagctgggctgtaagcaagaactccccgttcagcccgactgctgcgccttatccggtaactgttcacttgagtccaacccggaaaagcacggtaaaacgccactggcagcagccattggtaactgggagttcgcagaggatttgtttagctaaacacgcggttgctcttgaagtgtgcgccaaagtccggctacactggaaggacagatttggttgctgtgctctgcgaaagccagttaccacggttaagcagttccccaactgacttaaccttcgatcaaaccacctccccaggtggttttttcgtttacagggcaaaagattacgcgcagaaaaaaaggatctcaagaagatcctttgatcttttctactgaaccgctctagatttcagtgcaatttatctcttcaaatgtagcacctgaagtcagccccatacgatataagttgtaattctcatgttagtcatgccccgcgcccaccggaaggagctgactgggttgaaggctctcaagggcatcggtcgagatcccggtgcctaatgagtgagctaacttacattaattgcgttgcgctcactgcccgctttccagtcgggaaacctgtcgtgccagctgcattaatgaatcggccaacgcgcggggagaggcggtttgcgtattgggcgccagggtggtttttcttttcaccagtgagacgggcaacagctgattgcccttcaccgcctggccctgagagagttgcagcaagcggtccacgctggtttgccccagcaggcgaaaatcctgtttgatggtggttaacggcgggatataacatgagctgtcttcggtatcgtcgtatcccactaccgagatgtccgcaccaacgcgcagcccggactcggtaatggcgcgcattgcgcccagcgccatctgatcgttggcaaccagcatcgcagtgggaacgatgccctcattcagcatttgcatggtttgttgaaaaccggacatggcactccagtcgccttcccgttccgctatcggctgaatttgattgcgagtgagatatttatgccagccagccagacgcagacgcgccgagacagaacttaatgggcccgctaacagcgcgatttgctggtgacccaatgcgaccagatgctccacgcccagtcgcgtaccgtcttcatgggagaaaataatactgttgatgggtgtctggtcagagacatcaagaaataacgccggaacattagtgcaggcagcttccacagcaatggcatcctggtcatccagcggatagttaatgatcagcccactgacgcgttgcgcgagaagattgtgcaccgccgctttacaggcttcgacgccgcttcgttctaccatcgacaccaccacgctggcacccagttgatcggcgcgagatttaatcgccgcgacaatttgcgacggcgcgtgcagggccagactggaggtggcaacgccaatcagcaacgactgtttgcccgccagttgttgtgccacgcggttgggaatgtaattcagctccgccatcgccgcttccactttttcccgcgttttcgcagaaacgtggctggcctggttcaccacgcgggaaacggtctgataagagacaccggcatactctgcgacatcgtataacgttactggtttcac

SEQ ID NO: 5946 - DNA, 6744 bp, synthetic construct
  source 1..6744: mol_type = other DNA
attcaccaccctgaattgactctcttccgggcgctatcatgccataccgcgaaaggttttgcgccattcgatggtgtccgggattgacagctagctcagtcctaggtataatgctagcgtggagatatacctcgagaaagatttttttaggggctgtccgcacagccataggttggggctattcgcactcaataagtgaaagcatgcggttaaggcgtgagaaacctacatctaagcttgtaattccagtttttgtggcgtttaactggacttttgggattatttcggggatttattttctttttcaaatgaattttcattttccatttgcgctgataaaagtacacgtctacatttgaaactatagttaacctatagaataaatatattaaatctcctcgaggcggccgcactcttatgtattgcaatataaatatattagaaaacgatataaatttttgcttggtgtattgaaaaacgttatgtttatagcgaaaaaagataacatagtttttatgagactagttcttcctcaacctgaatattacaagatagcccttctgaatttgcttaagttgttgcagcttaaaggaataccaaaagaaagtattgaagacgtaaagcgtgtttacgaattgttggaaattttagatgctaacattaatgagcaaaacatttcttaagacccgcggccgcaataatagactagcataaccccttggggcctctaaacgggtcttgaggggttttttgctgaacgtacgttttacggctagctcagtcctaggtactatgctagcgtggagatatacggtaccaaggaggtaaataatggaaaaaataattctaacaaggaagatacaactggtgattccgtgtaaagaccgcgaaatcctgaagtcttactacgatcgcctttatgagttccagcgtcatacctgtaaagctgccaacctgatccacacccatctgttcatccaagatcgttggaaagaaatggtttatttagcggaagatgcaaagatcagcctggcggatcataaaaagaaggagggtggtgttttgaatacgagccgtatgaacagcacgtaccgccagctgtctgcgcattttctgaaagttctgccgagcaataccatgagcaacctgaaccaagccgtttaccgcacctatcaggcgaaccgtgacctgtattggcgtggtgaaaagtcgctcccaaattatagacgcgacatcccgattccgtttagtagccgtgagatgcgttgggaagaagcgggtgacggcaagaactttttgctgtacctctttcgtattccgttcaaaacttatctgggtcgtgaccgcagcgaactgaaatcgttgctcaaaaaaatcgtgaaaggcgagatcgcgctgcgtcaaagcgcgctgcaaatcaaaaacaacaaaatttatctgttggcgtccgtggaagtcgagaaagctaagcacagcctggataaaaccctgattgcggaagtggcattgtctctggaatatccgctggtcatcaaaatcggtaaggacgagttccagatcggcagcaaagaggagttcttgtaccgccgcttgtccattcaggcggcgcgtcgtagacttcaacaggcctgcgcatatcgctctggtggcaagggtaaggaagaacgttataagtgcctgaaacactataaagagaaggagaagaactacattgaagagaaattacacctgtacagccgtcgtctgattgattactgcgttaaggctggcgcaggcaccattctgttggtaaatcagtcctacaaagaggaactggctaaggaggacccgatgctgttacgtaattggtcctactacggcctgaaagagaagatcgcctacaaggcgaagatggcaggtattcacgtgttggttgagtaaggctccggaagaaggagatatacatatgggagactacaaagaccatgacggtgattataaagatcatgacatcgattacaaggatgacgatgacaagggaggatccggcagcatgaatattgaaaatataaacctaataaaattgaagaacggtaatgaagcgggtctgagctacttctatcgtcgtttttttccgtggtatacctttcgtgcgttccgctatatgcgtgacgacctggacgcccaatgtgcagtgcaggaggcgtttctccgtctttggctgaatcgtgctcaagtcgattctgtcgagagcatgcatgagttcctgaagcgccaggtgcaggaagcggcaaaagcattccaccgcaaaaggagcaacgagttcagaaagagcatgctgtattactttgactacgatgacccggatatcctgatcggccatagagccgtggaagaagaggttaccgaagagttacaaccagacgcgagcgatcaggagaaactggactcaattcaccgtttgttaccgcatctgggccgtgagcaagagttgtttatccgcctttgcctgcgttttaatttcaactacgagcgcatcgcgttctacctgggtggtattcgcgactacgaggtggctaataaggtgaacaaatgcattgtacaactgaaaaccctggttgcggattcctccaagttgtctagcgcatccaaaatggaaaccattcgtgttgatgaacgtttgacgccggaacaggcggaagttctcaagctgcgctatgagctgggcgcgtcgttcgatgacattggtcaggctctgcagatgccggtgtcgcgtgttcgtgaaatcttcatccaagccttcaccgtttttaaacacggcaaaaaccacagctacagcaagaacacggtgagctatagtctgtaagtccttaagccaaggagacgtaccatgacaaaaaaaaagactccctttggaaaatacctggagagcaagtctatcaaccaggcggctctggcgcgtaccaccggtattcgtccgaatcgcattagcgagttcgccacccaagattgcctgaaaatgcgcgcagacgagatctacctgttagctaaagcgctgggcgaacgtccgggtacgctgctcgactatttgttggcggaaatcaagtcctaagtcctaaagccaaggagacgtacaatggaacccaagatacacgagggaaaaaatgtgaaacgtttccgcgagatgctgggcattaaacaagaggcgctggcacaggagctgggtgaagactggacccagaagaaagtgtccctgatggaacaaaaggcggtccttgagccggaagttctctacaaagttagcaaggctttgaatataccggacatggcgatcaagaactttgatgaagaaaaggccatcaccattatcgctaataccgttaataacaacgatcatgcgacgggtaatagcctgttcaactatcagccgatctttaacccgattgataaaatcgtgcagttgcacgaagagaagatccagctgtacgaacgtatgctgcgtgagaaagaggacatgattaacaaattggagaagctgctgccacaaaactaataagaattcctgctgccaccgctgagcaataactagcataaccccttggggcctctaaacgggtcttgaggggttttttgctgaaacctcaggcatttgagaagcacacggtcacactgcttccggtagtcaataaaccggtaaaccagcaatagacataagcggctatttaacgaccctgccctgaaccgacgaccgggtcatcgtggccggatcttgcggcccctcggcttgaacgaattgttagacattatttgccgactaccttggtgatctcgcctttcacgtagtggacaaattcttccaactgatctgcgcgcgaggccaagcgatcttcttcttgtccaagataagcctgtctagcttcaagtatgacgggctgatactgggccggcaggcgctccattgcccagtcggcagcgacatccttcggcgcgattttgccggttactgcgctgtaccaaatgcgggacaacgtaagcactacatttcgctcatcgccagcccagtcgggcggcgagttccatagcgttaaggtttcatttagcgcctcaaatagatcctgttcaggaaccggatcaaagagttcctccgccgctggacctaccaaggcaacgctatgttctcttgcttttgtcagcaagatagccagatcaatgtcgatcgtggctggctcgaagatacctgcaagaatgtcattgcgctgccattctccaaattgcagttcgcgcttagctggataacgccacggaatgatgtcgtcgtgcacaacaatggtgacttctacagcgcggagaatctcgctctctccaggggaagccgaagtttccaaaaggtcgttgatcaaagctcgccgcgttgtttcatcaagccttacggtcaccgtaaccagcaaatcaatatcactgtgtggcttcaggccgccatccactgcggagccgtacaaatgtacggccagcaacgtcggttcgagatggcgctcgatgacgccaactacctctgatagttgagtcgatacttcggcgatcaccgcttccctcatactcttcctttttcaatattattgaagcatttatcagggttattgtctcatgagcggatacatatttgaatgtatttagaaaaataaacaaatagctagctcactcggtcgctacgctccgggcgtgagactgcggcgggcgctgcggacacatacaaagttacccacagattccgtggataagcaggggactaacatgtgaggcaaaacagcagggccgcgccggtggcgtttttccataggctccgccctcctgccagagttcacataaacagacgcttttccggtgcatctgtgggagccgtgaggctcaaccatgaatctgacagtacgggcgaaacccgacaggacttaaagatccccaccgtttccggcgggtcgctccctcttgcgctctcctgttccgaccctgccgtttaccggatacctgttccgcctttctcccttacgggaagtgtggcgctttctcatagctcacacactggtatctcggctcggtgtaggtcgttcgctccaagctgggctgtaagcaagaactccccgttcagcccgactgctgcgccttatccggtaactgttcacttgagtccaacccggaaaagcacggtaaaacgccactggcagcagccattggtaactgggagttcgcagaggatttgtttagctaaacacgcggttgctcttgaagtgtgcgccaaagtccggctacactggaaggacagatttggttgctgtgctctgcgaaagccagttaccacggttaagcagttccccaactgacttaaccttcgatcaaaccacctccccaggtggttttttcgtttacagggcaaaagattacgcgcagaaaaaaaggatctcaagaagatcctttgatcttttctactgaaccgctctagatttcagtgcaatttatctcttcaaatgtagcacctgaagtcagccccatacgatataagttgtaattctcatgttagtcatgccccgcgcccaccggaaggagctgactgggttgaaggctctcaagggcatcggtcgagatcccggtgcctaatgagtgagctaacttacattaattgcgttgcgctcactgcccgctttccagtcgggaaacctgtcgtgccagctgcattaatgaatcggccaacgcgcggggagaggcggtttgcgtattgggcgccagggtggtttttcttttcaccagtgagacgggcaacagctgattgcccttcaccgcctggccctgagagagttgcagcaagcggtccacgctggtttgccccagcaggcgaaaatcctgtttgatggtggttaacggcgggatataacatgagctgtcttcggtatcgtcgtatcccactaccgagatgtccgcaccaacgcgcagcccggactcggtaatggcgcgcattgcgcccagcgccatctgatcgttggcaaccagcatcgcagtgggaacgatgccctcattcagcatttgcatggtttgttgaaaaccggacatggcactccagtcgccttcccgttccgctatcggctgaatttgattgcgagtgagatatttatgccagccagccagacgcagacgcgccgagacagaacttaatgggcccgctaacagcgcgatttgctggtgacccaatgcgaccagatgctccacgcccagtcgcgtaccgtcttcatgggagaaaataatactgttgatgggtgtctggtcagagacatcaagaaataacgccggaacattagtgcaggcagcttccacagcaatggcatcctggtcatccagcggatagttaatgatcagcccactgacgcgttgcgcgagaagattgtgcaccgccgctttacaggcttcgacgccgcttcgttctaccatcgacaccaccacgctggcacccagttgatcggcgcgagatttaatcgccgcgacaatttgcgacggcgcgtgcagggccagactggaggtggcaacgccaatcagcaacgactgtttgcccgccagttgttgtgccacgcggttgggaatgtaattcagctccgccatcgccgcttccactttttcccgcgttttcgcagaaacgtggctggcctggttcaccacgcgggaaacggtctgataagagacaccggcatactctgcgacatcgtataacgttactggtttcac

SEQ ID NO: 5947 - DNA, 6095 bp, synthetic construct
  source 1..6095: mol_type = other DNA
attcaccaccctgaattgactctcttccgggcgctatcatgccataccgcgaaaggttttgcgccattcgatggtgtccgggattgacagctagctcagtcctaggtataatgctagcgtggagatatacctcgagctgtcaataaaatatgaggctgcttgtacagccgtagggtgtggccttgttgcctcactgaatatggattgaacctgagatcacatctgtatatacaacggctcgcttatcgtgtaaaaataagctttctataagttgtacggttaagttataagcagaacttatagtctcctcgaggcggccgcttatttagttttccgttacgtttttccagacttaaagtacaagtgtttaggcgaactggataaataatttgattttgtttagaaaatctatacattagtaatgttattctaaattagattggatttgcggccgcaataatagactagcataaccccttggggcctctaaacgggtcttgaggggttttttgctgaacgtacgttttacggctagctcagtcctaggtactatgctagcgtggagatatacggtaccaaggaggtaaataatggctgataatatgtatataacaaggaaaatccaaatcatcgtgaatagtccagataaagacgtggtgtacgacgctatcggtaaacttatgcagtggcagcaggcatgttataagtgcgccaatctgatttacacccatcaattcttgcaggagcagattgcggagatggtttacctggcggatggcgtgaaactgaaaatcagcgatcaccacaaagacgctgacggcatgctggtttccagccgtactaattctacgtacaaagtcctcaccgaaaagtttaagggtgttttaccgtcctccatttataacaacttgaactcgcagctggtaagcaccttcctcaaagagcgtggtttgtatgtcaacggtgaacgctccatccgcaacttcaagcgctcgatcgctatgccgttcagcgcggaaaacattagacgtctgaccgcaggggaccacggtaatttcaccttcatcctgtttggtattccgttccgcacctacttaggccgtggctatgatgaaaagcgcgaactgctccgtcaggttgtgaacggtaagatcaagctggcgtcttcttttctgaaggtcgaacaaaaaaaagtgtttctcctcgcgaccttcgagcaagagaagcagtttcacctgttaggtggtgcaattatcgcggaggcaagcctgagcttggaatatccgctgaccgttaaggttggcaaggcccgtatgaccattggtagcaaagaggagtttctgcatcgtcgtatggcgattcaagccgcccgcagccgtgtgcaggcgagcgttgatggcaacaaagctggccacggcaaggtgcgtaaacgtaagccgctggcgcattatcagagcctggagaaggattacattaagcacaaattgaacgtgtacagcaaacgcctgatcgacttctgcctgcaacatcgcgcagcgacgctgattctgactggtcagcaagaaaaggaagagatcgctatggccgaaccgttcttgctgcgtaactggaattttgccggcctgaaagagatgatcgcgtttaaagcggcgaaagtcggcatcgacctgattgttgaataaggctccggaagaaggagatatacatatgggagactacaaagaccatgacggtgattataaagatcatgacatcgattacaaggatgacgatgacaagggaggatccggcagcatggtaggaaaactatgtgaaatatcaagtttcgatgataaagtctttgagaagatcctgaagcagtatcgtttgaccatctactctttcggcaaacgtatgctgaacgacagctacattgttgaaaacattgttcaggatgcgttcttgaagctgtggaattttcgccagacgatcaccagcgacgagcacgcccgtcgtttcctgatgcaaagcgttaagtgggcatgctatagctattttcgcaacagcgactcccgtttccaccgtaacatgatccgtttgaacgactatgacaacccggcggatctgtttggtgaacacccggatgttcaaacctacaatgaccacaccgaagcgctgaatgagagccgcttgaatgaggttaaggaggcgattgacaaagtgtgctacggccgtgaaaaagaggtgatggaactgcattttatcaaaggcctgtcccattcccagatagctgaacgttaccacctctcgattcgtaccgtgaccgttattatcgagaaaggtacagtgcgcctgaagaccatcctcgtgaccgttaagactccggttcatgatattcagttgtctccggcgccaggttttgtagattcgttcaaccatattgaaggtctgaacgaggaacaaaacaaaatctatcacttacgtctgaccggtcgctacgacttcgagcaaatcgccagctttctgcaactgccgctggcgttcgtgcagacggagtatctgaaggcgtggaaaatcgccgcatgtctgaagaaaaaaaatggcaaaccggctggtcgtgctaataagggcattagcggtcgttacggcttactgtctgcataagtccttaagccaaggagacgtaccatgacaaatctaggattgtttttagctaaaaagtccgtgaacaaggcggagatcagccgtaaaacgggtattagcaaaagccgcctgtctgaattaagcatgaacaactcgaccaaactgcgtgcggatgaattgtacctgatcgctctggcaattgacgttgatccgaaagagttgctgaatcacctgttcatggacctcaagctgaaggactaataagaattcctgctgccaccgctgagcaataactagcataaccccttggggcctctaaacgggtcttgaggggttttttgctgaaacctcaggcatttgagaagcacacggtcacactgcttccggtagtcaataaaccggtaaaccagcaatagacataagcggctatttaacgaccctgccctgaaccgacgaccgggtcatcgtggccggatcttgcggcccctcggcttgaacgaattgttagacattatttgccgactaccttggtgatctcgcctttcacgtagtggacaaattcttccaactgatctgcgcgcgaggccaagcgatcttcttcttgtccaagataagcctgtctagcttcaagtatgacgggctgatactgggccggcaggcgctccattgcccagtcggcagcgacatccttcggcgcgattttgccggttactgcgctgtaccaaatgcgggacaacgtaagcactacatttcgctcatcgccagcccagtcgggcggcgagttccatagcgttaaggtttcatttagcgcctcaaatagatcctgttcaggaaccggatcaaagagttcctccgccgctggacctaccaaggcaacgctatgttctcttgcttttgtcagcaagatagccagatcaatgtcgatcgtggctggctcgaagatacctgcaagaatgtcattgcgctgccattctccaaattgcagttcgcgcttagctggataacgccacggaatgatgtcgtcgtgcacaacaatggtgacttctacagcgcggagaatctcgctctctccaggggaagccgaagtttccaaaaggtcgttgatcaaagctcgccgcgttgtttcatcaagccttacggtcaccgtaaccagcaaatcaatatcactgtgtggcttcaggccgccatccactgcggagccgtacaaatgtacggccagcaacgtcggttcgagatggcgctcgatgacgccaactacctctgatagttgagtcgatacttcggcgatcaccgcttccctcatactcttcctttttcaatattattgaagcatttatcagggttattgtctcatgagcggatacatatttgaatgtatttagaaaaataaacaaatagctagctcactcggtcgctacgctccgggcgtgagactgcggcgggcgctgcggacacatacaaagttacccacagattccgtggataagcaggggactaacatgtgaggcaaaacagcagggccgcgccggtggcgtttttccataggctccgccctcctgccagagttcacataaacagacgcttttccggtgcatctgtgggagccgtgaggctcaaccatgaatctgacagtacgggcgaaacccgacaggacttaaagatccccaccgtttccggcgggtcgctccctcttgcgctctcctgttccgaccctgccgtttaccggatacctgttccgcctttctcccttacgggaagtgtggcgctttctcatagctcacacactggtatctcggctcggtgtaggtcgttcgctccaagctgggctgtaagcaagaactccccgttcagcccgactgctgcgccttatccggtaactgttcacttgagtccaacccggaaaagcacggtaaaacgccactggcagcagccattggtaactgggagttcgcagaggatttgtttagctaaacacgcggttgctcttgaagtgtgcgccaaagtccggctacactggaaggacagatttggttgctgtgctctgcgaaagccagttaccacggttaagcagttccccaactgacttaaccttcgatcaaaccacctccccaggtggttttttcgtttacagggcaaaagattacgcgcagaaaaaaaggatctcaagaagatcctttgatcttttctactgaaccgctctagatttcagtgcaatttatctcttcaaatgtagcacctgaagtcagccccatacgatataagttgtaattctcatgttagtcatgccccgcgcccaccggaaggagctgactgggttgaaggctctcaagggcatcggtcgagatcccggtgcctaatgagtgagctaacttacattaattgcgttgcgctcactgcccgctttccagtcgggaaacctgtcgtgccagctgcattaatgaatcggccaacgcgcggggagaggcggtttgcgtattgggcgccagggtggtttttcttttcaccagtgagacgggcaacagctgattgcccttcaccgcctggccctgagagagttgcagcaagcggtccacgctggtttgccccagcaggcgaaaatcctgtttgatggtggttaacggcgggatataacatgagctgtcttcggtatcgtcgtatcccactaccgagatgtccgcaccaacgcgcagcccggactcggtaatggcgcgcattgcgcccagcgccatctgatcgttggcaaccagcatcgcagtgggaacgatgccctcattcagcatttgcatggtttgttgaaaaccggacatggcactccagtcgccttcccgttccgctatcggctgaatttgattgcgagtgagatatttatgccagccagccagacgcagacgcgccgagacagaacttaatgggcccgctaacagcgcgatttgctggtgacccaatgcgaccagatgctccacgcccagtcgcgtaccgtcttcatgggagaaaataatactgttgatgggtgtctggtcagagacatcaagaaataacgccggaacattagtgcaggcagcttccacagcaatggcatcctggtcatccagcggatagttaatgatcagcccactgacgcgttgcgcgagaagattgtgcaccgccgctttacaggcttcgacgccgcttcgttctaccatcgacaccaccacgctggcacccagttgatcggcgcgagatttaatcgccgcgacaatttgcgacggcgcgtgcagggccagactggaggtggcaacgccaatcagcaacgactgtttgcccgccagttgttgtgccacgcggttgggaatgtaattcagctccgccatcgccgcttccactttttcccgcgttttcgcagaaacgtggctggcctggttcaccacgcgggaaacggtctgataagagacaccggcatactctgcgacatcgtataacgttactggtttcac

SEQ ID NO: 5948 - DNA, 6634 bp, synthetic construct
  source 1..6634: mol_type = other DNA
attcaccaccctgaattgactctcttccgggcgctatcatgccataccgcgaaaggttttgcgccattcgatggtgtccgggattgacagctagctcagtcctaggtataatgctagcgtggagatatacctcgagatcttgcttttctgaggctgcttgtacagccgcatggtgaggctatgcaaggcactcactaagtatcctgacggatatatacaatggcccctattagcttttggccactagttatatcaagagggatgtttacaattgggcctacttattcgttttggagggaaatctattctatccctctgcccgaaaaaaggaggatgaaacaagaaaaagaatcctcggtggtgatatacgattgcccttttcaactagcttttagaccaactattggcaatcgtatatcggcgccggggggccaaagccggtacgggtgcccggttttattctcccgctgatcggctgcggctgcttataccgaagcccacaattcaattcgggacgcactacgccccgaattgagttgtaggaaattcaagttgccaggagattaaaaaaggaccgatgaacgaatggggcctgaaggcagagatagacatgaaagattcctactagttcattgataaacctgcaaagcaactgacgaggcgggagcgctcctcgaggcggccgctaatcacctattggcaagtataaaggtgcggtattcttgtgtccttgacaatcacccataggtaagtatttgagggtttatgcggccgcaataatagactagcataaccccttggggcctctaaacgggtcttgaggggttttttgctgaacgtacgttttacggctagctcagtcctaggtactatgctagcgtggagatatacggtaccaaggaggtaaataatgaatgctgaaacaatgatactaactaggaaggtgcaactgataattgacagcaacgataaggcgtttattggcgaggtgtacagaaccctgtaccgctggcagtacatttgctttcgcgcggctaactatatttttacgcatcttttcatccaagaacagctcaaggaactgttctacctaaaggacgaggtcaaggtgaaattggctgattgttgcaaaaacccggatggcatcctgacgtgcagccagttgggcaccacgtatagagtattgaacaaacacttcaaaggcgatatcccgatgaatatcatctcctctctgaatatgaccttggccaagcacttcaacaacgaaaaggagggttatctgaaaggcgagaagtccgtgcgtaattacaaacgcgatattccgattccatttcagcgtcgtaacattacccgtctgcaattggccgaaaatgcaaaggagtataaatttaatctgttcaaaatcccgtttcacacctatctgggccgtgacaagtttgacaagcgtctcttgttcgaccgtctgctgaaaggtgaggtccagctgaagaactcttcattacagctgtgcaacggtaagatctacctgctggcggctttcgagactcgtaaagagaagcacgaactggatgcgtcgatcgtggcggaagcgcatctgagcatcgactacccgatcgtggttcggattgggaaattccaagctaccatcggcagcaaagaggagttcctgtaccgtagactggcgatccaagcagcccgtagccgtgcgcagaaagacgcatcgtacaatcgtggtcaacatggtagacgtcgcaagctgaaggccttagaacatttccgcgatcgcgaacgtgactatgttcagcagcgtctgcacgtttatagccgtcaattgattgacctgtgtgttaagcaccgcgcggcgagcctgatcctggttggtcaaaccgaaaaagaggcagcggctgcaggtgaggagttcgtttttcgcaactggtcctactacgcactgaaagaaaaaattcagtataaagcgaacaaagcgggcattatgctgatcaccgagtaaggctccggaagaaggagatatacatatgggagactacaaagaccatgacggtgattataaagatcatgacatcgattacaaggatgacgatgacaagggaggatccggcagcatgagttatgaactaccaacacccactgagcaagcgtatttcctccgctataaaaacggcgaagaggagggtttcacccagctgtaccgcatgatgttcaacagcctgctgcgctacggcatgcgtattctgcccaacgagttcgctgtgaccaccatcgtacaggatgcgttgttgaaggcttgggattttcgtgaacgtatgacctgtctgcaacacacctttcgttttatgtgcatgaatgttaaatgggcctgctacgactactaccgccaaccggaaatccgccaggtcgtgtatctagaccacgacacctacccggatgttagcttcctgccgggttcggaagaggcgggtccggtgtgcaatgaagaggcgctgctgaaaagcatttatgacgtgatgccgtatctgccgatgaacaaacaaacgatcctgcagttgtacttcaagtacggcttctcttacaagcagattgcgaaacgttacggcgcaaatatccagaccatttccaagaacctgcatgaagcgctcgcgtatctgaagaaagttattcactccaagaagcagctgaccaaaccgatttcttttccggttacgaacgacaaataccaggcagaggagtacctgactggtgaaatgctgcaattgtttaaacttcgttacgagagcaagctgccgtttgatgtcatcgccgcgaaattgaatctgccacagccgtatatccagcagcaatatgcagctgcccatgcgaagctgcaacaattgaagatcagccgtcgtccgtaagtccttaagccaaggagacgtaccatgaaaacaaagattgatctatatgtaataacccgtgtgaaagagaagcgcctggaaaagaacatcagccaggcagaattagctaatgaactgggtatgtctgttggttttatcggcaaagtcgagtccccgaagtacccgagccattataacattaagcacctgaaccagttggcgaaaattctggactgcagcccgcaagagttcttgccaaagaaaccgctgccgtaagtcctaaagccaaggagacgtacaatgaagtcaaaaatagatatttatgtaatagacaaggtgcgcgagatgcgtattgcgcataatatgtcgcaagaggaattgtctatcaaggcgggttttcgtagcaatggcttcgtcggtcaggcagagagctttaaatacaacaaacgttataacgttcaccacatcaaccgcttcgctcaaattttcaactgctccccgcaggattttctgccggaaacctatctgtactaataagaattcctgctgccaccgctgagcaataactagcataaccccttggggcctctaaacgggtcttgaggggttttttgctgaaacctcaggcatttgagaagcacacggtcacactgcttccggtagtcaataaaccggtaaaccagcaatagacataagcggctatttaacgaccctgccctgaaccgacgaccgggtcatcgtggccggatcttgcggcccctcggcttgaacgaattgttagacattatttgccgactaccttggtgatctcgcctttcacgtagtggacaaattcttccaactgatctgcgcgcgaggccaagcgatcttcttcttgtccaagataagcctgtctagcttcaagtatgacgggctgatactgggccggcaggcgctccattgcccagtcggcagcgacatccttcggcgcgattttgccggttactgcgctgtaccaaatgcgggacaacgtaagcactacatttcgctcatcgccagcccagtcgggcggcgagttccatagcgttaaggtttcatttagcgcctcaaatagatcctgttcaggaaccggatcaaagagttcctccgccgctggacctaccaaggcaacgctatgttctcttgcttttgtcagcaagatagccagatcaatgtcgatcgtggctggctcgaagatacctgcaagaatgtcattgcgctgccattctccaaattgcagttcgcgcttagctggataacgccacggaatgatgtcgtcgtgcacaacaatggtgacttctacagcgcggagaatctcgctctctccaggggaagccgaagtttccaaaaggtcgttgatcaaagctcgccgcgttgtttcatcaagccttacggtcaccgtaaccagcaaatcaatatcactgtgtggcttcaggccgccatccactgcggagccgtacaaatgtacggccagcaacgtcggttcgagatggcgctcgatgacgccaactacctctgatagttgagtcgatacttcggcgatcaccgcttccctcatactcttcctttttcaatattattgaagcatttatcagggttattgtctcatgagcggatacatatttgaatgtatttagaaaaataaacaaatagctagctcactcggtcgctacgctccgggcgtgagactgcggcgggcgctgcggacacatacaaagttacccacagattccgtggataagcaggggactaacatgtgaggcaaaacagcagggccgcgccggtggcgtttttccataggctccgccctcctgccagagttcacataaacagacgcttttccggtgcatctgtgggagccgtgaggctcaaccatgaatctgacagtacgggcgaaacccgacaggacttaaagatccccaccgtttccggcgggtcgctccctcttgcgctctcctgttccgaccctgccgtttaccggatacctgttccgcctttctcccttacgggaagtgtggcgctttctcatagctcacacactggtatctcggctcggtgtaggtcgttcgctccaagctgggctgtaagcaagaactccccgttcagcccgactgctgcgccttatccggtaactgttcacttgagtccaacccggaaaagcacggtaaaacgccactggcagcagccattggtaactgggagttcgcagaggatttgtttagctaaacacgcggttgctcttgaagtgtgcgccaaagtccggctacactggaaggacagatttggttgctgtgctctgcgaaagccagttaccacggttaagcagttccccaactgacttaaccttcgatcaaaccacctccccaggtggttttttcgtttacagggcaaaagattacgcgcagaaaaaaaggatctcaagaagatcctttgatcttttctactgaaccgctctagatttcagtgcaatttatctcttcaaatgtagcacctgaagtcagccccatacgatataagttgtaattctcatgttagtcatgccccgcgcccaccggaaggagctgactgggttgaaggctctcaagggcatcggtcgagatcccggtgcctaatgagtgagctaacttacattaattgcgttgcgctcactgcccgctttccagtcgggaaacctgtcgtgccagctgcattaatgaatcggccaacgcgcggggagaggcggtttgcgtattgggcgccagggtggtttttcttttcaccagtgagacgggcaacagctgattgcccttcaccgcctggccctgagagagttgcagcaagcggtccacgctggtttgccccagcaggcgaaaatcctgtttgatggtggttaacggcgggatataacatgagctgtcttcggtatcgtcgtatcccactaccgagatgtccgcaccaacgcgcagcccggactcggtaatggcgcgcattgcgcccagcgccatctgatcgttggcaaccagcatcgcagtgggaacgatgccctcattcagcatttgcatggtttgttgaaaaccggacatggcactccagtcgccttcccgttccgctatcggctgaatttgattgcgagtgagatatttatgccagccagccagacgcagacgcgccgagacagaacttaatgggcccgctaacagcgcgatttgctggtgacccaatgcgaccagatgctccacgcccagtcgcgtaccgtcttcatgggagaaaataatactgttgatgggtgtctggtcagagacatcaagaaataacgccggaacattagtgcaggcagcttccacagcaatggcatcctggtcatccagcggatagttaatgatcagcccactgacgcgttgcgcgagaagattgtgcaccgccgctttacaggcttcgacgccgcttcgttctaccatcgacaccaccacgctggcacccagttgatcggcgcgagatttaatcgccgcgacaatttgcgacggcgcgtgcagggccagactggaggtggcaacgccaatcagcaacgactgtttgcccgccagttgttgtgccacgcggttgggaatgtaattcagctccgccatcgccgcttccactttttcccgcgttttcgcagaaacgtggctggcctggttcaccacgcgggaaacggtctgataagagacaccggcatactctgcgacatcgtataacgttactggtttcac

SEQ ID NO: 5949 - DNA, 6369 bp, synthetic construct
  source 1..6369: mol_type = other DNA
attcaccaccctgaattgactctcttccgggcgctatcatgccataccgcgaaaggttttgcgccattcgatggtgtccgggattgacagctagctcagtcctaggtataatgctagcgtggagatatacctcgagaattaaaaatgagggtgcttgtacacccgtaaggtgaggtctcaatggcactcactaaatgcaggcagcatatacaacaaaaaccttccctttttttaggcattgaggtatgaaggatgaagacaactggaattatgatgaacagaaatatttaggcttggtcattgaaaatcaactcctcgaggcggccgccttagccctttctacacctaagatgagtaaaaaaatcaaaaatattgttggtgtatattacaacaaaaaagaaattatttatatctttatccaacaactacaagtacagccttttacgttaaaccataatttcataattgaatttatcatgtaaaattctttgagatttaaaaccaaacctataagaagaaacaaaccaccgtttaatgaattagccatttagtctaggctagaagccagaaagccttccctcaagcataagcctttccctaagtttaacggctttttcgggaaggcctatggtttcataaactaattaaagacaaccaaaaccacagcaaattatgaaaactatactccacaccgctatactcttactatttattagtacagtacctattcgaaaatcccatccaacattaaaaactgttggctgcggccgcaataatagactagcataaccccttggggcctctaaacgggtcttgaggggttttttgctgaacgtacgttttacggctagctcagtcctaggtactatgctagcgtggagatatacggtaccaaggaggtaaataatgggaaaagaaacaataaagctaactaggaagatccaattgctggtggacgctccgaataaagaggaacgcaaagaggccctggataccctgtaccgctggcagaaccgcagctaccgcgctggcaatctgattgtcacccaccagtacatccaagagatgattaaggactttttctatctgtctgaaggtattcgttatcgcttggtcgatgaaaagaaagcggaagacggcatcctgaaccgttcgaaatccaactgcacgtaccgtgttgttagcgatcgtttcaaaggtgaggtgccgaccaatatcctggcgaatatgaactacaacatcatgaataacttcagcaaaaacttggttcagtaccgccgtggtgaacgttcactggctaatttccgtcgtgatattccattcccgtttggtacgattggcatccatggtctgtcttataagaaggagaagaaagcgttttgttttcgtttgttttcgatcccgttcaaaacctatctgggtaaggactacaccgataagaggtccttgttggagcaggttgtagctggcaacattaagctgtgtaccagcaaaatccaactgaacaagggtaagatttattggctggcggtgtttgaagtggcgaaagagaagcacaacctgaaaccggaagtcatcgccgaggctagcctctctctggagcatccgattattgttaaaagccggaaggcgactctctccatcgggagccgtgaagaatttctgtaccgtcgtttggcgattcaagcagcactgaaacgtgcacagaacgcaaccgcatattgccgtagcggtaagggccgtaaacgtaagaccaaagccgttgaacgattccacgaaaaggagaagaactacgtgagcaaccgtctacatgtttatagccgcaaactcatcgatttctgcatcaagcacgaggcgggcacgttaatcttattgaaccaggaggacaagatggaaattgcgaaagaggacggcttcgtgctgcgtaattggaattactatgaactgatgaccaaaatcaaatacaaagcggagaaggcgggtattgaactgatcgtggactaaggctccggaagaaggagatatacatatgggagactacaaagaccatgacggtgattataaagatcatgacatcgattacaaggatgacgatgacaagggaggatccggcagcatggaaagggagtttaagctattaaaagaaggtcacccggacgctatggagttcatctacgcccgttaccaacacaagttgttttggatgggcaaacaacttatcaaggacgagttcgtgatcgagagcattctccaagataccttcctcaagctgtgggaaaagcgcgatcatattgaggacccgaaacacatgctgtacttcctgctgcatgttatgaagcgcgactgcagctattactacattagaccacgtaacaactttcatcgtaatatcaacagcctggataattatgaaaactaccaagagtatattcacggctatgacccggaatcggaagacgagcacctgaaggaccaggaggctaatcagaaagcgctggaccgtattaagtgcgtgtttccgctgttacgaccggaacgtcgttacctgatcgagttgtgtctgaaatatggtttccagtataaaaacatcgcggaactgatgggcacctctactacgtacacctccaacgaggtgaagcgcgcaattgatgatattaagaagatcatccaccagggtagcaatctgggttccaaaccggatcagattcaggtcaaaaagaacacgcgcatcacccgtgaacaggagaaagttctgcagttgcgcaacgagatgcattatagttttgcggcaatcgccgaggaactgcaattgtctcagaaagaggttcacaaagagttcatgaccgcgtacaaattgctgcaaagcaagcacaaacagcaacaaagcgcgtaagtccttaagccaaggagacgtaccatgcaaaatgaaaaggacaaagtagattttcttatccaatttggcagcaatttcggcaaaatccgtaagatgaagaacttatccttccgcgctctgagccagaaatgcgatttggattacgcggacctgaacaagatcgagaaaggtaagcgtaatattacgctgaccaccattgcagaactggcgcgtggtctgaacgtgcacccgaaagagttgtttgacttcgactttaccccgtaataagaattcctgctgccaccgctgagcaataactagcataaccccttggggcctctaaacgggtcttgaggggttttttgctgaaacctcaggcatttgagaagcacacggtcacactgcttccggtagtcaataaaccggtaaaccagcaatagacataagcggctatttaacgaccctgccctgaaccgacgaccgggtcatcgtggccggatcttgcggcccctcggcttgaacgaattgttagacattatttgccgactaccttggtgatctcgcctttcacgtagtggacaaattcttccaactgatctgcgcgcgaggccaagcgatcttcttcttgtccaagataagcctgtctagcttcaagtatgacgggctgatactgggccggcaggcgctccattgcccagtcggcagcgacatccttcggcgcgattttgccggttactgcgctgtaccaaatgcgggacaacgtaagcactacatttcgctcatcgccagcccagtcgggcggcgagttccatagcgttaaggtttcatttagcgcctcaaatagatcctgttcaggaaccggatcaaagagttcctccgccgctggacctaccaaggcaacgctatgttctcttgcttttgtcagcaagatagccagatcaatgtcgatcgtggctggctcgaagatacctgcaagaatgtcattgcgctgccattctccaaattgcagttcgcgcttagctggataacgccacggaatgatgtcgtcgtgcacaacaatggtgacttctacagcgcggagaatctcgctctctccaggggaagccgaagtttccaaaaggtcgttgatcaaagctcgccgcgttgtttcatcaagccttacggtcaccgtaaccagcaaatcaatatcactgtgtggcttcaggccgccatccactgcggagccgtacaaatgtacggccagcaacgtcggttcgagatggcgctcgatgacgccaactacctctgatagttgagtcgatacttcggcgatcaccgcttccctcatactcttcctttttcaatattattgaagcatttatcagggttattgtctcatgagcggatacatatttgaatgtatttagaaaaataaacaaatagctagctcactcggtcgctacgctccgggcgtgagactgcggcgggcgctgcggacacatacaaagttacccacagattccgtggataagcaggggactaacatgtgaggcaaaacagcagggccgcgccggtggcgtttttccataggctccgccctcctgccagagttcacataaacagacgcttttccggtgcatctgtgggagccgtgaggctcaaccatgaatctgacagtacgggcgaaacccgacaggacttaaagatccccaccgtttccggcgggtcgctccctcttgcgctctcctgttccgaccctgccgtttaccggatacctgttccgcctttctcccttacgggaagtgtggcgctttctcatagctcacacactggtatctcggctcggtgtaggtcgttcgctccaagctgggctgtaagcaagaactccccgttcagcccgactgctgcgccttatccggtaactgttcacttgagtccaacccggaaaagcacggtaaaacgccactggcagcagccattggtaactgggagttcgcagaggatttgtttagctaaacacgcggttgctcttgaagtgtgcgccaaagtccggctacactggaaggacagatttggttgctgtgctctgcgaaagccagttaccacggttaagcagttccccaactgacttaaccttcgatcaaaccacctccccaggtggttttttcgtttacagggcaaaagattacgcgcagaaaaaaaggatctcaagaagatcctttgatcttttctactgaaccgctctagatttcagtgcaatttatctcttcaaatgtagcacctgaagtcagccccatacgatataagttgtaattctcatgttagtcatgccccgcgcccaccggaaggagctgactgggttgaaggctctcaagggcatcggtcgagatcccggtgcctaatgagtgagctaacttacattaattgcgttgcgctcactgcccgctttccagtcgggaaacctgtcgtgccagctgcattaatgaatcggccaacgcgcggggagaggcggtttgcgtattgggcgccagggtggtttttcttttcaccagtgagacgggcaacagctgattgcccttcaccgcctggccctgagagagttgcagcaagcggtccacgctggtttgccccagcaggcgaaaatcctgtttgatggtggttaacggcgggatataacatgagctgtcttcggtatcgtcgtatcccactaccgagatgtccgcaccaacgcgcagcccggactcggtaatggcgcgcattgcgcccagcgccatctgatcgttggcaaccagcatcgcagtgggaacgatgccctcattcagcatttgcatggtttgttgaaaaccggacatggcactccagtcgccttcccgttccgctatcggctgaatttgattgcgagtgagatatttatgccagccagccagacgcagacgcgccgagacagaacttaatgggcccgctaacagcgcgatttgctggtgacccaatgcgaccagatgctccacgcccagtcgcgtaccgtcttcatgggagaaaataatactgttgatgggtgtctggtcagagacatcaagaaataacgccggaacattagtgcaggcagcttccacagcaatggcatcctggtcatccagcggatagttaatgatcagcccactgacgcgttgcgcgagaagattgtgcaccgccgctttacaggcttcgacgccgcttcgttctaccatcgacaccaccacgctggcacccagttgatcggcgcgagatttaatcgccgcgacaatttgcgacggcgcgtgcagggccagactggaggtggcaacgccaatcagcaacgactgtttgcccgccagttgttgtgccacgcggttgggaatgtaattcagctccgccatcgccgcttccactttttcccgcgttttcgcagaaacgtggctggcctggttcaccacgcgggaaacggtctgataagagacaccggcatactctgcgacatcgtataacgttactggtttcac

SEQ ID NO: 5950 - DNA, 6436 bp, synthetic construct
  source 1..6436: mol_type = other DNA
attcaccaccctgaattgactctcttccgggcgctatcatgccataccgcgaaaggttttgcgccattcgatggtgtccgggattgacagctagctcagtcctaggtataatgctagcgtggagatatacctcgagaaaaaataacgagggtgcttgtacacccgcagggtgaggtgttgaacactcactaaatactcagtgagtatatacaacggcgtgggctctttttttacttatgttttaaaatacttcaaacgctcattaataaattaaaggattacttcagggtaataacttttatatttaaggctcaaccatctagttgagccttaaatatgaattacaaatgtacttttacagcatctctgttttttaaatacttataaatagcattactcctcgaggcggccgcttgctaacattttatacaaagggcgtaattttatttgcaaattttgttacaagttcttgtaacaaattggaaatttcttatatttgaacaaattagttataaaggtaattttgtgatagtcaaagaaatatagaagctattgctttagattctcgactggaaaactggcacttttcaaaaagcaacgagttattaagtaaatgtgcccacgacctcggcaagggctcacttatcgttgctcggtatgccagtaccaccagtcggtaagttgagttccacgcattctttttggcaatatgtagtgagataatgtttgaatgttgcagataattcatataaagatctaaacaattccttcagcaataatttaattaaaattcgctgtttgcggccgcaataatagactagcataaccccttggggcctctaaacgggtcttgaggggttttttgctgaacgtacgttttacggctagctcagtcctaggtactatgctagcgtggagatatacggtaccaaggaggtaaataatggaaaaatcaacaatgacgctaactaggcgcatccaactgctcatcgacctgccagcgaacgaacagaaagagatgtgggaaaagttgtaccgttaccagaatcgttgtttccgtgcagcaaattttattgtgagccatctgtacgtacaagagatgattaaggacttcttctatctgaccgaggacatccaatataagctcgctgacgaaaataaagataaaatgggtatttttacccgcagcaagacccacaccaccgctcgcatggtgtttgatcgttttaagggtgaaatcccgacagatattctgggctcgctgaataacaccattcaaagcacctttagcaaaacgaaggcggactactggcagggtacgaaaagcttgcgtaatttcaaaaaggacatcccgattccgctgccggtcaagtgcattagcaaaatgaaatatgatccagaaaagaaggcgtattcttttaacatgtttgccatcccggttaaaacctaccttggcaacgattactccgataaaagagttattatggaacgtttactgcgcgaggagatcaagctgtgcaccagccagattcagctgaaggccggcaaaatctattggctggctgtgttcgagttcgaaaaagaggagcacaaactgaaaccggagatcatcgcggaagcatcgctgagcttggaacacccgattgtcgtgaaggcgaacaacgttcgtattaacattggttccaaggaagagttcctgtaccgtcgtttggcgattcaagcgtcccagaagaggattcaggatggtatcgcgtatacccgttccggtaatggtgttaagcgcaaacagaaggctctgtacaaaaccgagaacctggagtctcgttatgttagtcatcgtttacatttgtatagccgtaagctgatcgacttctgcatccaacagcaggcaggcactttgatcctgaaaaaccaggaggacaagatcggtattgccagagagcaagagttcgtgttgcgcaactggagctattacgagctgcaaacgaaaatcaaatacaaagcggaaaaagcgggcatcgaactgattatcggctaaggctccggaagaaggagatatacatatgggagactacaaagaccatgacggtgattataaagatcatgacatcgattacaaggatgacgatgacaagggaggatccggcagcatgaaaagaacaaattcactacccaggaagctgaccaatctgcaactgtacgaattacttaaaaagagcaacccgacggccttggagcatctgcatctccgttataaacgtctgttgttctgggttggttggcaggtgctgaaagacgattttgtcgtggacaccatcgtgcaggatacgtttttgaagctgtggctgcaccgcgacaccatcgaaaccccggatcacattaccggcttcctgcgttttgttatgaaacgtgattgtattagctatgttaccgcaccgcgtaacaaattcaaccgtttaatggcgagcctggacagcttcgagaactaccaggactatctggcgggctacgatccgctgaaggacaaggaatacttgctgagccaagagagcgaccagaagaactttgatgaggttaagaaggtgcttccggttttggacccgaaacgtaaacacctgatcgaactctgcttggaatatggtttccagcataagccaatcgctgaagctatgggtagctccgtgaaggacatcagtaatgaagtcagccgtgcaattaacgatctgcgcaaaattctgaaccgctcctccagcgagcagccgaaaggcaaagcgctggataataagaaacagtctgaaaagctgtcttcgcaacaattagacatcctgaaacgccgtttcgaacaaaagtcctcttttgcggttattgcccaggagctgaaattgcctgaaaaagaggtgcacagagagttcctgtacgcgtaccaacacctccaaaaccagaataccagcgagatcccgctgtaagtccttaagccaaggagacgtaccatggatgtactaaaggacgaaatattaaaaaagtttggtgaacacgtgaaagatttacgtattaaatctggtctgacgcaggatgaggtggttttgaatagcagcaaaatcaccaagggcaccgttagcgatatcgagaacggcaagcgcaacttcgcgtttactaccctgattgacctggctaaaggtctgaacgtctccccgaaggacttgctgaatttcaagatcgactaataagaattcctgctgccaccgctgagcaataactagcataaccccttggggcctctaaacgggtcttgaggggttttttgctgaaacctcaggcatttgagaagcacacggtcacactgcttccggtagtcaataaaccggtaaaccagcaatagacataagcggctatttaacgaccctgccctgaaccgacgaccgggtcatcgtggccggatcttgcggcccctcggcttgaacgaattgttagacattatttgccgactaccttggtgatctcgcctttcacgtagtggacaaattcttccaactgatctgcgcgcgaggccaagcgatcttcttcttgtccaagataagcctgtctagcttcaagtatgacgggctgatactgggccggcaggcgctccattgcccagtcggcagcgacatccttcggcgcgattttgccggttactgcgctgtaccaaatgcgggacaacgtaagcactacatttcgctcatcgccagcccagtcgggcggcgagttccatagcgttaaggtttcatttagcgcctcaaatagatcctgttcaggaaccggatcaaagagttcctccgccgctggacctaccaaggcaacgctatgttctcttgcttttgtcagcaagatagccagatcaatgtcgatcgtggctggctcgaagatacctgcaagaatgtcattgcgctgccattctccaaattgcagttcgcgcttagctggataacgccacggaatgatgtcgtcgtgcacaacaatggtgacttctacagcgcggagaatctcgctctctccaggggaagccgaagtttccaaaaggtcgttgatcaaagctcgccgcgttgtttcatcaagccttacggtcaccgtaaccagcaaatcaatatcactgtgtggcttcaggccgccatccactgcggagccgtacaaatgtacggccagcaacgtcggttcgagatggcgctcgatgacgccaactacctctgatagttgagtcgatacttcggcgatcaccgcttccctcatactcttcctttttcaatattattgaagcatttatcagggttattgtctcatgagcggatacatatttgaatgtatttagaaaaataaacaaatagctagctcactcggtcgctacgctccgggcgtgagactgcggcgggcgctgcggacacatacaaagttacccacagattccgtggataagcaggggactaacatgtgaggcaaaacagcagggccgcgccggtggcgtttttccataggctccgccctcctgccagagttcacataaacagacgcttttccggtgcatctgtgggagccgtgaggctcaaccatgaatctgacagtacgggcgaaacccgacaggacttaaagatccccaccgtttccggcgggtcgctccctcttgcgctctcctgttccgaccctgccgtttaccggatacctgttccgcctttctcccttacgggaagtgtggcgctttctcatagctcacacactggtatctcggctcggtgtaggtcgttcgctccaagctgggctgtaagcaagaactccccgttcagcccgactgctgcgccttatccggtaactgttcacttgagtccaacccggaaaagcacggtaaaacgccactggcagcagccattggtaactgggagttcgcagaggatttgtttagctaaacacgcggttgctcttgaagtgtgcgccaaagtccggctacactggaaggacagatttggttgctgtgctctgcgaaagccagttaccacggttaagcagttccccaactgacttaaccttcgatcaaaccacctccccaggtggttttttcgtttacagggcaaaagattacgcgcagaaaaaaaggatctcaagaagatcctttgatcttttctactgaaccgctctagatttcagtgcaatttatctcttcaaatgtagcacctgaagtcagccccatacgatataagttgtaattctcatgttagtcatgccccgcgcccaccggaaggagctgactgggttgaaggctctcaagggcatcggtcgagatcccggtgcctaatgagtgagctaacttacattaattgcgttgcgctcactgcccgctttccagtcgggaaacctgtcgtgccagctgcattaatgaatcggccaacgcgcggggagaggcggtttgcgtattgggcgccagggtggtttttcttttcaccagtgagacgggcaacagctgattgcccttcaccgcctggccctgagagagttgcagcaagcggtccacgctggtttgccccagcaggcgaaaatcctgtttgatggtggttaacggcgggatataacatgagctgtcttcggtatcgtcgtatcccactaccgagatgtccgcaccaacgcgcagcccggactcggtaatggcgcgcattgcgcccagcgccatctgatcgttggcaaccagcatcgcagtgggaacgatgccctcattcagcatttgcatggtttgttgaaaaccggacatggcactccagtcgccttcccgttccgctatcggctgaatttgattgcgagtgagatatttatgccagccagccagacgcagacgcgccgagacagaacttaatgggcccgctaacagcgcgatttgctggtgacccaatgcgaccagatgctccacgcccagtcgcgtaccgtcttcatgggagaaaataatactgttgatgggtgtctggtcagagacatcaagaaataacgccggaacattagtgcaggcagcttccacagcaatggcatcctggtcatccagcggatagttaatgatcagcccactgacgcgttgcgcgagaagattgtgcaccgccgctttacaggcttcgacgccgcttcgttctaccatcgacaccaccacgctggcacccagttgatcggcgcgagatttaatcgccgcgacaatttgcgacggcgcgtgcagggccagactggaggtggcaacgccaatcagcaacgactgtttgcccgccagttgttgtgccacgcggttgggaatgtaattcagctccgccatcgccgcttccactttttcccgcgttttcgcagaaacgtggctggcctggttcaccacgcgggaaacggtctgataagagacaccggcatactctgcgacatcgtataacgttactggtttcac

SEQ ID NO: 5951 - DNA, 6842 bp, synthetic construct
  source 1..6842: mol_type = other DNA
attcaccaccctgaattgactctcttccgggcgctatcatgccataccgcgaaaggttttgcgccattcgatggtgtccgggattgacagctagctcagtcctaggtataatgctagcgtggagatatacctcgagcaattagattttgagggtgcttgtacacccatagggtgaggttaagaattacactcactaagtgtgaacaacacatacaacctcccttaacttgccctcatatagcaatcaataagcctaaatacgggcacctaaatacaatatgggacaaacaccgataaagtttttttgaacgattgaaaatggatacttttaatgaagtgtccagaaatcgtcaaatattagatagaacccttgggatattgcttctccttataggtatcgcaattgggattttccttattcctgattttttaccactacttaaaaggactccttatttattgctcgaacccgatgcaggtgtaagacatgagcttggatacgcttggtttatgcaatcaattggttggatcattgcttttttcgcatttaggagcagtagggcatttttaagggatagcaagaaaccaactagtaccagtaattaaatcaaaggtgaaagaggtatatagttgcctaaacaccatatacaactcactgaaaaaccgctccgaaacgcaatattctgtgatgacagccattcatccggtaggctaaagtatgtaaaaagaagctaatgtcatcttcccttttctcctcgaggcggccgcaaatgaaaaaattacaagaagtttttttgagagcgttcgctctcatttaggggtttttattatatttatccctgaaataacatatttgcgaaacttgttaagttaataatattagaagcattcgctttgattctcgcatcaaaaactggtaatttttaacgacgagatgataagtgcaaatgctcacggcccgggcgtgagcttacttattgtcgtgcggtataccagtaccttgatgctataggttaagttttcacgccctctttatcttatttaaaaagggctttctcaacttttcaaagctatcttctctttatccttttttaagaaatcgcatcagctttaaaagcataatcaattttaaccatggtgcattgaccatcttaaacgaggcctgttgcggccgcaataatagactagcataaccccttggggcctctaaacgggtcttgaggggttttttgctgaacgtacgttttacggctagctcagtcctaggtactatgctagcgtggagatatacggtaccaaggaggtaaataatgggagactacaaagaccatgacggtgattataaagatcatgacatcgattacaaggatgacgatgacaagggaggatccggcagcatgggaaaatcaacactaaagcacactaggaagattcagatcttgatcgacctgccgacgaaagacgagaagaaagaggttatggatatgatgtatcagtggcgtgatcgttgcttccgcgcagcgaacattatcgtgacccatctgtacgttcaggagatgatcaaggacttcttttatctgagcgaaggtattaagtacaaactcgcggatgagaaaaaagacgaaaagggcatcctgcaacgtagccgtatgaacaccacctatcgcgtggtgagcgaccgttttaagggcgagatgccgacgaatatcctttccaccctgaaccacggcctgatcagcagctttaacaaaaaccgcgtccagtattggaaaggcgaacgtagcctgccaaatttcaaaaaggacatggcattcccgtttggtctgcaaggtatctctcgtctggtgtatgatgaagaaaaaaaggcgttctgctttagattgtaccgcgttccgtttaaaacgtacttgggtaaggacttcaccgataaacgcatgctgctggagcgcctagtcaaaggagacgttaagctgtgtgcgtcgaacattcaactgaatggtggtaagatcttttggctggctgtattcgaaattgaaaaggagaagcacagcctcaaaccggaagtgattgccgaagcttcgctctccttggagtatccgattgttgtgaagactggtaagaaccgtctgaccattggtactaaagaagagttcctgtaccgcagattggcgattcaagcggcgcgtcgtcgtacccaggttggtgcaacctacagccgttctggtaagggtaagaagcgcaaattaaaagccgtcgataaataccataaaacggaatcaaactatgtggcgcatcgtattcacgtttacagccgtaagttaatcgatttctgcattaaacaccaagcgggcaccctgatccttatgaatcaggaggacaaagttggcatcgccaaagaggaggagttcgtgctgcgtaattggtcctattacgaactgatgaccaaaatcaagtacaaagctgagaaggctggcatcgaattgattatcggctaaggctccggaagaaggagatatacatatgttatattcagattttgaattgctaaaaattggcgacactagtgcgttggaccatatccatgcaaaatactttcgttccatcctgtggatcggccgtcagtggctgaacgatgattttttgatcgagtctctggttcaggatacgtttctaaagctgtgggttaatagagataagctggaaagcccggaacacattttttacttcttgcgtttcgtgatgaagcgcgagtgcattagctattaccgtaaaccaaaatacaaatttcataaaaaagtgaacagcttggaggattacgacaactatcaggactatatggtgggttatgatccggttaacgactctgagaacctggacgaacaagaaagcacccagaaatccttcgaccacattaaatcgattcttccgctgctgaatgcggataagcgccatctgatcgagttatgtctgaagtacggtttccaatataaggcgatcagcaaagttatgggtaaaggtattcacgaaaccagccgtgaaatcaaagaagccatcgaggacatcaagaccattgtccacaagggcaacgagctcggcagcaatgacaccatgaccaatgaaatcaagtttagcggtgaattatccgaggaacaggctaaggtgctgaagatgcgctgcgatttgaagtacagcttctctgagattgccaaggagctggaactgtccgagaaagaggtacaccaagagttcatgaaggcatataaactgatgaaagcgaaccaccagttgcaactgcaaagcgcgtaagtccttaagccaaggagacgtaccatgctaatggctgataagaacacaaataaatcgaaggtctatttcagcgataaatacgtgtgcaagttcatcagcgaagagtggctgaccagcaaggacacctccgcgcgtaaatacggtaaaatctacggcgtgaactaccatgttattgaaaagatccagcaagagaatggttataacattccgctgagcaccctgtctacgatttgttttaaccacggcatcaaattgtccgacttctttaaattggttgagaagaagtacggtgaatttctgaatgatagctatgagtataaataataagaattcctgctgccaccgctgagcaataactagcataaccccttggggcctctaaacgggtcttgaggggttttttgctgaaacctcaggcatttgagaagcacacggtcacactgcttccggtagtcaataaaccggtaaaccagcaatagacataagcggctatttaacgaccctgccctgaaccgacgaccgggtcatcgtggccggatcttgcggcccctcggcttgaacgaattgttagacattatttgccgactaccttggtgatctcgcctttcacgtagtggacaaattcttccaactgatctgcgcgcgaggccaagcgatcttcttcttgtccaagataagcctgtctagcttcaagtatgacgggctgatactgggccggcaggcgctccattgcccagtcggcagcgacatccttcggcgcgattttgccggttactgcgctgtaccaaatgcgggacaacgtaagcactacatttcgctcatcgccagcccagtcgggcggcgagttccatagcgttaaggtttcatttagcgcctcaaatagatcctgttcaggaaccggatcaaagagttcctccgccgctggacctaccaaggcaacgctatgttctcttgcttttgtcagcaagatagccagatcaatgtcgatcgtggctggctcgaagatacctgcaagaatgtcattgcgctgccattctccaaattgcagttcgcgcttagctggataacgccacggaatgatgtcgtcgtgcacaacaatggtgacttctacagcgcggagaatctcgctctctccaggggaagccgaagtttccaaaaggtcgttgatcaaagctcgccgcgttgtttcatcaagccttacggtcaccgtaaccagcaaatcaatatcactgtgtggcttcaggccgccatccactgcggagccgtacaaatgtacggccagcaacgtcggttcgagatggcgctcgatgacgccaactacctctgatagttgagtcgatacttcggcgatcaccgcttccctcatactcttcctttttcaatattattgaagcatttatcagggttattgtctcatgagcggatacatatttgaatgtatttagaaaaataaacaaatagctagctcactcggtcgctacgctccgggcgtgagactgcggcgggcgctgcggacacatacaaagttacccacagattccgtggataagcaggggactaacatgtgaggcaaaacagcagggccgcgccggtggcgtttttccataggctccgccctcctgccagagttcacataaacagacgcttttccggtgcatctgtgggagccgtgaggctcaaccatgaatctgacagtacgggcgaaacccgacaggacttaaagatccccaccgtttccggcgggtcgctccctcttgcgctctcctgttccgaccctgccgtttaccggatacctgttccgcctttctcccttacgggaagtgtggcgctttctcatagctcacacactggtatctcggctcggtgtaggtcgttcgctccaagctgggctgtaagcaagaactccccgttcagcccgactgctgcgccttatccggtaactgttcacttgagtccaacccggaaaagcacggtaaaacgccactggcagcagccattggtaactgggagttcgcagaggatttgtttagctaaacacgcggttgctcttgaagtgtgcgccaaagtccggctacactggaaggacagatttggttgctgtgctctgcgaaagccagttaccacggttaagcagttccccaactgacttaaccttcgatcaaaccacctccccaggtggttttttcgtttacagggcaaaagattacgcgcagaaaaaaaggatctcaagaagatcctttgatcttttctactgaaccgctctagatttcagtgcaatttatctcttcaaatgtagcacctgaagtcagccccatacgatataagttgtaattctcatgttagtcatgccccgcgcccaccggaaggagctgactgggttgaaggctctcaagggcatcggtcgagatcccggtgcctaatgagtgagctaacttacattaattgcgttgcgctcactgcccgctttccagtcgggaaacctgtcgtgccagctgcattaatgaatcggccaacgcgcggggagaggcggtttgcgtattgggcgccagggtggtttttcttttcaccagtgagacgggcaacagctgattgcccttcaccgcctggccctgagagagttgcagcaagcggtccacgctggtttgccccagcaggcgaaaatcctgtttgatggtggttaacggcgggatataacatgagctgtcttcggtatcgtcgtatcccactaccgagatgtccgcaccaacgcgcagcccggactcggtaatggcgcgcattgcgcccagcgccatctgatcgttggcaaccagcatcgcagtgggaacgatgccctcattcagcatttgcatggtttgttgaaaaccggacatggcactccagtcgccttcccgttccgctatcggctgaatttgattgcgagtgagatatttatgccagccagccagacgcagacgcgccgagacagaacttaatgggcccgctaacagcgcgatttgctggtgacccaatgcgaccagatgctccacgcccagtcgcgtaccgtcttcatgggagaaaataatactgttgatgggtgtctggtcagagacatcaagaaataacgccggaacattagtgcaggcagcttccacagcaatggcatcctggtcatccagcggatagttaatgatcagcccactgacgcgttgcgcgagaagattgtgcaccgccgctttacaggcttcgacgccgcttcgttctaccatcgacaccaccacgctggcacccagttgatcggcgcgagatttaatcgccgcgacaatttgcgacggcgcgtgcagggccagactggaggtggcaacgccaatcagcaacgactgtttgcccgccagttgttgtgccacgcggttgggaatgtaattcagctccgccatcgccgcttccactttttcccgcgttttcgcagaaacgtggctggcctggttcaccacgcgggaaacggtctgataagagacaccggcatactctgcgacatcgtataacgttactggtttcac

SEQ ID NO: 5952 - DNA, 6842 bp, synthetic construct; identical to SEQ ID NO: 5951
  source 1..6842: mol_type = other DNA

SEQ ID NO: 5953 - DNA, 6842 bp, synthetic construct
  source 1..6842: mol_type = other DNA
attcaccaccctgaattgactctcttccgggcgctatcatgccataccgcgaaaggttttgcgccattcgatggtgtccgggattgacagctagctcagtcctaggtataatgctagcgtggagatatacctcgagcaattagattttgagggtgcttgtacacccatagggtgaggttaagaattacactcactaagtgtgaacaacacatacaaccagaaatttgcacagtgcgcatagcaatcaataagcctaaatacgggcacctaaatacaatatgggacaaacaccgataaagtttttttgaacgattgaaaatggatacttttaatgaagtgtccagaaatcgtcaaatattagatagaacccttgggatattgcttctccttataggtatcgcaattgggattttccttattcctgattttttaccactacttaaaaggactccttatttattgctcgaacccgatgcaggtgtaagacatgagcttggatacgcttggtttatgcaatcaattggttggatcattgcttttttcgcatttaggagcagtagggcatttttaagggatagcaagaaaccaactagtaccagtaattaaatcaaaggtgaaagaggtatatagttgcctaaacaccatatacaactcactgaaaaaccgctccgaaacgcaatattctgtgatgacagccattcatccggtaggctaaagtatgtaaaaagaagctaatgtcatcttcccttttctcctcgaggcggccgcaaatgaaaaaattacaagaagtttttttgagagcgttcgctctcatttaggggtttttattatatttatccctgaaataacatatttgcgaaacttgttaagttaataatattagaagcattcgctttgattctcgcatcaaaaactggtaatttttaacgacgagatgataagtgcaaatgctcacggcccgggcgtgagcttacttattgtcgtgcggtataccagtaccttgatgctataggttaagttttcacgccctctttatcttatttaaaaagggctttctcaacttttcaaagctatcttctctttatccttttttaagaaatcgcatcagctttaaaagcataatcaattttaaccatggtgcattgaccatcttaaacgaggcctgttgcggccgcaataatagactagcataaccccttggggcctctaaacgggtcttgaggggttttttgctgaacgtacgttttacggctagctcagtcctaggtactatgctagcgtggagatatacggtaccaaggaggtaaataatgggagactacaaagaccatgacggtgattataaagatcatgacatcgattacaaggatgacgatgacaagggaggatccggcagcatgggaaaatcaacactaaagcacactaggaagattcagatcttgatcgacctgccgacgaaagacgagaagaaagaggttatggatatgatgtatcagtggcgtgatcgttgcttccgcgcagcgaacattatcgtgacccatctgtacgttcaggagatgatcaaggacttcttttatctgagcgaaggtattaagtacaaactcgcggatgagaaaaaagacgaaaagggcatcctgcaacgtagccgtatgaacaccacctatcgcgtggtgagcgaccgttttaagggcgagatgccgacgaatatcctttccaccctgaaccacggcctgatcagcagctttaacaaaaaccgcgtccagtattggaaaggcgaacgtagcctgccaaatttcaaaaaggacatggcattcccgtttggtctgcaaggtatctctcgtctggtgtatgatgaagaaaaaaaggcgttctgctttagattgtaccgcgttccgtttaaaacgtacttgggtaaggacttcaccgataaacgcatgctgctggagcgcctagtcaaaggagacgttaagctgtgtgcgtcgaacattcaactgaatggtggtaagatcttttggctggctgtattcgaaattgaaaaggagaagcacagcctcaaaccggaagtgattgccgaagcttcgctctccttggagtatccgattgttgtgaagactggtaagaaccgtctgaccattggtactaaagaagagttcctgtaccgcagattggcgattcaagcggcgcgtcgtcgtacccaggttggtgcaacctacagccgttctggtaagggtaagaagcgcaaattaaaagccgtcgataaataccataaaacggaatcaaactatgtggcgcatcgtattcacgtttacagccgtaagttaatcgatttctgcattaaacaccaagcgggcaccctgatccttatgaatcaggaggacaaagttggcatcgccaaagaggaggagttcgtgctgcgtaattggtcctattacgaactgatgaccaaaatcaagtacaaagctgagaaggctggcatcgaattgattatcggctaaggctccggaagaaggagatatacatatgttatattcagattttgaattgctaaaaattggcgacactagtgcgttggaccatatccatgcaaaatactttcgttccatcctgtggatcggccgtcagtggctgaacgatgattttttgatcgagtctctggttcaggatacgtttctaaagctgtgggttaatagagataagctggaaagcccggaacacattttttacttcttgcgtttcgtgatgaagcgcgagtgcattagctattaccgtaaaccaaaatacaaatttcataaaaaagtgaacagcttggaggattacgacaactatcaggactatatggtgggttatgatccggttaacgactctgagaacctggacgaacaagaaagcacccagaaatccttcgaccacattaaatcgattcttccgctgctgaatgcggataagcgccatctgatcgagttatgtctgaagtacggtttccaatataaggcgatcagcaaagttatgggtaaaggtattcacgaaaccagccgtgaaatcaaagaagccatcgaggacatcaagaccattgtccacaagggcaacgagctcggcagcaatgacaccatgaccaatgaaatcaagtttagcggtgaattatccgaggaacaggctaaggtgctgaagatgcgctgcgatttgaagtacagcttctctgagattgccaaggagctggaactgtccgagaaagaggtacaccaagagttcatgaaggcatataaactgatgaaagcgaaccaccagttgcaactgcaaagcgcgtaagtccttaagccaaggagacgtaccatgctaatggctgataagaacacaaataaatcgaaggtctatttcagcgataaatacgtgtgcaagttcatcagcgaagagtggctgaccagcaaggacacctccgcgcgtaaatacggtaaaatctacggcgtgaactaccatgttattgaaaagatccagcaagagaatggttataacattccgctgagcaccctgtctacgatttgttttaaccacggcatcaaattgtccgacttctttaaattggttgagaagaagtacggtgaatttctgaatgatagctatgagtataaataataagaattcctgctgccaccgctgagcaataactagcataaccccttggggcctctaaacgggtcttgaggggttttttgctgaaacctcaggcatttgagaagcacacggtcacactgcttccggtagtcaataaaccggtaaaccagcaatagacataagcggctatttaacgaccctgccctgaaccgacgaccgggtcatcgtggccggatcttgcggcccctcggcttgaacgaattgttagacattatttgccgactaccttggtgatctcgcctttcacgtagtggacaaattcttccaactgatctgcgcgcgaggccaagcgatcttcttcttgtccaagataagcctgtctagcttcaagtatgacgggctgatactgggccggcaggcgctccattgcccagtcggcagcgacatccttcggcgcgattttgccggttactgcgctgtaccaaatgcgggacaacgtaagcactacatttcgctcatcgccagcccagtcgggcggcgagttccatagcgttaaggtttcatttagcgcctcaaatagatcctgttcaggaaccggatcaaagagttcctccgccgctggacctaccaaggcaacgctatgttctcttgcttttgtcagcaagatagccagatcaatgtcgatcgtggctggctcgaagatacctgcaagaatgtcattgcgctgccattctccaaattgcagttcgcgcttagctggataacgccacggaatgatgtcgtcgtgcacaacaatggtgacttctacagcgcggagaatctcgctctctccaggggaagccgaagtttccaaaaggtcgttgatcaaagctcgccgcgttgtttcatcaagccttacggtcaccgtaaccagcaaatcaatatcactgtgtggcttcaggccgccatccactgcggagccgtacaaatgtacggccagcaacgtcggttcgagatggcgctcgatgacgccaactacctctgatagttgagtcgatacttcggcgatcaccgcttccctcatactcttcctttttcaatattattgaagcatttatcagggttattgtctcatgagcggatacatatttgaatgtatttagaaaaataaacaaatagctagctcactcggtcgctacgctccgggcgtgagactgcggcgggcgctgcggacacatacaaagttacccacagattccgtggataagcaggggactaacatgtgaggcaaaacagcagggccgcgccggtggcgtttttccataggctccgccctcctgccagagttcacataaacagacgcttttccggtgcatctgtgggagccgtgaggctcaaccatgaatctgacagtacgggcgaaacccgacaggacttaaagatccccaccgtttccggcgggtcgctccctcttgcgctctcctgttccgaccctgccgtttaccggatacctgttccgcctttctcccttacgggaagtgtggcgctttctcatagctcacacactggtatctcggctcggtgtaggtcgttcgctccaagctgggctgtaagcaagaactccccgttcagcccgactgctgcgccttatccggtaactgttcacttgagtccaacccggaaaagcacggtaaaacgccactggcagcagccattggtaactgggagttcgcagaggatttgtttagctaaacacgcggttgctcttgaagtgtgcgccaaagtccggctacactggaaggacagatttggttgctgtgctctgcgaaagccagttaccacggttaagcagttccccaactgacttaaccttcgatcaaaccacctccccaggtggttttttcgtttacagggcaaaagattacgcgcagaaaaaaaggatctcaagaagatcctttgatcttttctactgaaccgctctagatttcagtgcaatttatctcttcaaatgtagcacctgaagtcagccccatacgatataagttgtaattctcatgttagtcatgccccgcgcccaccggaaggagctgactgggttgaaggctctcaagggcatcggtcgagatcccggtgcctaatgagtgagctaacttacattaattgcgttgcgctcactgcccgctttccagtcgggaaacctgtcgtgccagctgcattaatgaatcggccaacgcgcggggagaggcggtttgcgtattgggcgccagggtggtttttcttttcaccagtgagacgggcaacagctgattgcccttcaccgcctggccctgagagagttgcagcaagcggtccacgctggtttgccccagcaggcgaaaatcctgtttgatggtggttaacggcgggatataacatgagctgtcttcggtatcgtcgtatcccactaccgagatgtccgcaccaacgcgcagcccggactcggtaatggcgcgcattgcgcccagcgccatctgatcgttggcaaccagcatcgcagtgggaacgatgccctcattcagcatttgcatggtttgttgaaaaccggacatggcactccagtcgccttcccgttccgctatcggctgaatttgattgcgagtgagatatttatgccagccagccagacgcagacgcgccgagacagaacttaatgggcccgctaacagcgcgatttgctggtgacccaatgcgaccagatgctccacgcccagtcgcgtaccgtcttcatgggagaaaataatactgttgatgggtgtctggtcagagacatcaagaaataacgccggaacattagtgcaggcagcttccacagcaatggcatcctggtcatccagcggatagttaatgatcagcccactgacgcgttgcgcgagaagattgtgcaccgccgctttacaggcttcgacgccgcttcgttctaccatcgacaccaccacgctggcacccagttgatcggcgcgagatttaatcgccgcgacaatttgcgacggcgcgtgcagggccagactggaggtggcaacgccaatcagcaacgactgtttgcccgccagttgttgtgccacgcggttgggaatgtaattcagctccgccatcgccgcttccactttttcccgcgttttcgcagaaacgtggctggcctggttcaccacgcgggaaacggtctgataagagacaccggcatactctgcgacatcgtataacgttactggtttcac

SEQ ID NO: 5954 - DNA, 6842 bp, synthetic construct
  source 1..6842: mol_type = other DNA
attcaccaccctgaattgactctcttccgggcgctatcatgccataccgcgaaaggttttgcgccattcgatggtgtccgggattgacagctagctcagtcctaggtataatgctagcgtggagatatacctcgagcaattagattttgagggtgcttgtacacccatagggtgaggttaagaattacactcactaagtgtgaacaacacatacaacttttgttacctgcctctaacatagcaatcaataagcctaaatacgggcacctaaatacaatatgggacaaacaccgataaagtttttttgaacgattgaaaatggatacttttaatgaagtgtccagaaatcgtcaaatattagatagaacccttgggatattgcttctccttataggtatcgcaattgggattttccttattcctgattttttaccactacttaaaaggactccttatttattgctcgaacccgatgcaggtgtaagacatgagcttggatacgcttggtttatgcaatcaattggttggatcattgcttttttcgcatttaggagcagtagggcatttttaagggatagcaagaaaccaactagtaccagtaattaaatcaaaggtgaaagaggtatatagttgcctaaacaccatatacaactcactgaaaaaccgctccgaaacgcaatattctgtgatgacagccattcatccggtaggctaaagtatgtaaaaagaagctaatgtcatcttcccttttctcctcgaggcggccgcaaatgaaaaaattacaagaagtttttttgagagcgttcgctctcatttaggggtttttattatatttatccctgaaataacatatttgcgaaacttgttaagttaataatattagaagcattcgctttgattctcgcatcaaaaactggtaatttttaacgacgagatgataagtgcaaatgctcacggcccgggcgtgagcttacttattgtcgtgcggtataccagtaccttgatgctataggttaagttttcacgccctctttatcttatttaaaaagggctttctcaacttttcaaagctatcttctctttatccttttttaagaaatcgcatcagctttaaaagcataatcaattttaaccatggtgcattgaccatcttaaacgaggcctgttgcggccgcaataatagactagcataaccccttggggcctctaaacgggtcttgaggggttttttgctgaacgtacgttttacggctagctcagtcctaggtactatgctagcgtggagatatacggtaccaaggaggtaaataatgggagactacaaagaccatgacggtgattataaagatcatgacatcgattacaaggatgacgatgacaagggaggatccggcagcatgggaaaatcaacactaaagcacactaggaagattcagatcttgatcgacctgccgacgaaagacgagaagaaagaggttatggatatgatgtatcagtggcgtgatcgttgcttccgcgcagcgaacattatcgtgacccatctgtacgttcaggagatgatcaaggacttcttttatctgagcgaaggtattaagtacaaactcgcggatgagaaaaaagacgaaaagggcatcctgcaacgtagccgtatgaacaccacctatcgcgtggtgagcgaccgttttaagggcgagatgccgacgaatatcctttccaccctgaaccacggcctgatcagcagctttaacaaaaaccgcgtccagtattggaaaggcgaacgtagcctgccaaatttcaaaaaggacatggcattcccgtttggtctgcaaggtatctctcgtctggtgtatgatgaagaaaaaaaggcgttctgctttagattgtaccgcgttccgtttaaaacgtacttgggtaaggacttcaccgataaacgcatgctgctggagcgcctagtcaaaggagacgttaagctgtgtgcgtcgaacattcaactgaatggtggtaagatcttttggctggctgtattcgaaattgaaaaggagaagcacagcctcaaaccggaagtgattgccgaagcttcgctctccttggagtatccgattgttgtgaagactggtaagaaccgtctgaccattggtactaaagaagagttcctgtaccgcagattggcgattcaagcggcgcgtcgtcgtacccaggttggtgcaacctacagccgttctggtaagggtaagaagcgcaaattaaaagccgtcgataaataccataaaacggaatcaaactatgtggcgcatcgtattcacgtttacagccgtaagttaatcgatttctgcattaaacaccaagcgggcaccctgatccttatgaatcaggaggacaaagttggcatcgccaaagaggaggagttcgtgctgcgtaattggtcctattacgaactgatgaccaaaatcaagtacaaagctgagaaggctggcatcgaattgattatcggctaaggctccggaagaaggagatatacatatgttatattcagattttgaattgctaaaaattggcgacactagtgcgttggaccatatccatgcaaaatactttcgttccatcctgtggatcggccgtcagtggctgaacgatgattttttgatcgagtctctggttcaggatacgtttctaaagctgtgggttaatagagataagctggaaagcccggaacacattttttacttcttgcgtttcgtgatgaagcgcgagtgcattagctattaccgtaaaccaaaatacaaatttcataaaaaagtgaacagcttggaggattacgacaactatcaggactatatggtgggttatgatccggttaacgactctgagaacctggacgaacaagaaagcacccagaaatccttcgaccacattaaatcgattcttccgctgctgaatgcggataagcgccatctgatcgagttatgtctgaagtacggtttccaatataaggcgatcagcaaagttatgggtaaaggtattcacgaaaccagccgtgaaatcaaagaagccatcgaggacatcaagaccattgtccacaagggcaacgagctcggcagcaatgacaccatgaccaatgaaatcaagtttagcggtgaattatccgaggaacaggctaaggtgctgaagatgcgctgcgatttgaagtacagcttctctgagattgccaaggagctggaactgtccgagaaagaggtacaccaagagttcatgaaggcatataaactgatgaaagcgaaccaccagttgcaactgcaaagcgcgtaagtccttaagccaaggagacgtaccatgctaatggctgataagaacacaaataaatcgaaggtctatttcagcgataaatacgtgtgcaagttcatcagcgaagagtggctgaccagcaaggacacctccgcgcgtaaatacggtaaaatctacggcgtgaactaccatgttattgaaaagatccagcaagagaatggttataacattccgctgagcaccctgtctacgatttgttttaaccacggcatcaaattgtccgacttctttaaattggttgagaagaagtacggtgaatttctgaatgatagctatgagtataaataataagaattcctgctgccaccgctgagcaataactagcataaccccttggggcctctaaacgggtcttgaggggttttttgctgaaacctcaggcatttgagaagcacacggtcacactgcttccggtagtcaataaaccggtaaaccagcaatagacataagcggctatttaacgaccctgccctgaaccgacgaccgggtcatcgtggccggatcttgcggcccctcggcttgaacgaattgttagacattatttgccgactaccttggtgatctcgcctttcacgtagtggacaaattcttccaactgatctgcgcgcgaggccaagcgatcttcttcttgtccaagataagcctgtctagcttcaagtatgacgggctgatactgggccggcaggcgctccattgcccagtcggcagcgacatccttcggcgcgattttgccggttactgcgctgtaccaaatgcgggacaacgtaagcactacatttcgctcatcgccagcccagtcgggcggcgagttccatagcgttaaggtttcatttagcgcctcaaatagatcctgttcaggaaccggatcaaagagttcctccgccgctggacctaccaaggcaacgctatgttctcttgcttttgtcagcaagatagccagatcaatgtcgatcgtggctggctcgaagatacctgcaagaatgtcattgcgctgccattctccaaattgcagttcgcgcttagctggataacgccacggaatgatgtcgtcgtgcacaacaatggtgacttctacagcgcggagaatctcgctctctccaggggaagccgaagtttccaaaaggtcgttgatcaaagctcgccgcgttgtttcatcaagccttacggtcaccgtaaccagcaaatcaatatcactgtgtggcttcaggccgccatccactgcggagccgtacaaatgtacggccagcaacgtcggttcgagatggcgctcgatgacgccaactacctctgatagttgagtcgatacttcggcgatcaccgcttccctcatactcttcctttttcaatattattgaagcatttatcagggttattgtctcatgagcggatacatatttgaatgtatttagaaaaataaacaaatagctagctcactcggtcgctacgctccgggcgtgagactgcggcgggcgctgcggacacatacaaagttacccacagattccgtggataagcaggggactaacatgtgaggcaaaacagcagggccgcgccggtggcgtttttccataggctccgccctcctgccagagttcacataaacagacgcttttccggtgcatctgtgggagccgtgaggctcaaccatgaatctgacagtacgggcgaaacccgacaggacttaaagatccccaccgtttccggcgggtcgctccctcttgcgctctcctgttccgaccctgccgtttaccggatacctgttccgcctttctcccttacgggaagtgtggcgctttctcatagctcacacactggtatctcggctcggtgtaggtcgttcgctccaagctgggctgtaagcaagaactccccgttcagcccgactgctgcgccttatccggtaactgttcacttgagtccaacccggaaaagcacggtaaaacgccactggcagcagccattggtaactgggagttcgcagaggatttgtttagctaaacacgcggttgctcttgaagtgtgcgccaaagtccggctacactggaaggacagatttggttgctgtgctctgcgaaagccagttaccacggttaagcagttccccaactgacttaaccttcgatcaaaccacctccccaggtggttttttcgtttacagggcaaaagattacgcgcagaaaaaaaggatctcaagaagatcctttgatcttttctactgaaccgctctagatttcagtgcaatttatctcttcaaatgtagcacctgaagtcagccccatacgatataagttgtaattctcatgttagtcatgccccgcgcccaccggaaggagctgactgggttgaaggctctcaagggcatcggtcgagatcccggtgcctaatgagtgagctaacttacattaattgcgttgcgctcactgcccgctttccagtcgggaaacctgtcgtgccagctgcattaatgaatcggccaacgcgcggggagaggcggtttgcgtattgggcgccagggtggtttttcttttcaccagtgagacgggcaacagctgattgcccttcaccgcctggccctgagagagttgcagcaagcggtccacgctggtttgccccagcaggcgaaaatcctgtttgatggtggttaacggcgggatataacatgagctgtcttcggtatcgtcgtatcccactaccgagatgtccgcaccaacgcgcagcccggactcggtaatggcgcgcattgcgcccagcgccatctgatcgttggcaaccagcatcgcagtgggaacgatgccctcattcagcatttgcatggtttgttgaaaaccggacatggcactccagtcgccttcccgttccgctatcggctgaatttgattgcgagtgagatatttatgccagccagccagacgcagacgcgccgagacagaacttaatgggcccgctaacagcgcgatttgctggtgacccaatgcgaccagatgctccacgcccagtcgcgtaccgtcttcatgggagaaaataatactgttgatgggtgtctggtcagagacatcaagaaataacgccggaacattagtgcaggcagcttccacagcaatggcatcctggtcatccagcggatagttaatgatcagcccactgacgcgttgcgcgagaagattgtgcaccgccgctttacaggcttcgacgccgcttcgttctaccatcgacaccaccacgctggcacccagttgatcggcgcgagatttaatcgccgcgacaatttgcgacggcgcgtgcagggccagactggaggtggcaacgccaatcagcaacgactgtttgcccgccagttgttgtgccacgcggttgggaatgtaattcagctccgccatcgccgcttccactttttcccgcgttttcgcagaaacgtggctggcctggttcaccacgcgggaaacggtctgataagagacaccggcatactctgcgacatcgtataacgttactggtttcac

SEQ ID NO: 5955 - DNA, 6842 bp, synthetic construct
  source 1..6842: mol_type = other DNA
attcaccaccctgaattgactctcttccgggcgctatcatgccataccgcgaaaggttttgcgccattcgatggtgtccgggattgacagctagctcagtcctaggtataatgctagcgtggagatatacctcgagcaattagattttgagggtgcttgtacacccatagggtgaggttaagaattacactcactaagtgtgaacaacacatacaactaccagcgtgatgacgttcgatagcaatcaataagcctaaatacgggcacctaaatacaatatgggacaaacaccgataaagtttttttgaacgattgaaaatggatacttttaatgaagtgtccagaaatcgtcaaatattagatagaacccttgggatattgcttctccttataggtatcgcaattgggattttccttattcctgattttttaccactacttaaaaggactccttatttattgctcgaacccgatgcaggtgtaagacatgagcttggatacgcttggtttatgcaatcaattggttggatcattgcttttttcgcatttaggagcagtagggcatttttaagggatagcaagaaaccaactagtaccagtaattaaatcaaaggtgaaagaggtatatagttgcctaaacaccatatacaactcactgaaaaaccgctccgaaacgcaatattctgtgatgacagccattcatccggtaggctaaagtatgtaaaaagaagctaatgtcatcttcccttttctcctcgaggcggccgcaaatgaaaaaattacaagaagtttttttgagagcgttcgctctcatttaggggtttttattatatttatccctgaaataacatatttgcgaaacttgttaagttaataatattagaagcattcgctttgattctcgcatcaaaaactggtaatttttaacgacgagatgataagtgcaaatgctcacggcccgggcgtgagcttacttattgtcgtgcggtataccagtaccttgatgctataggttaagttttcacgccctctttatcttatttaaaaagggctttctcaacttttcaaagctatcttctctttatccttttttaagaaatcgcatcagctttaaaagcataatcaattttaaccatggtgcattgaccatcttaaacgaggcctgttgcggccgcaataatagactagcataaccccttggggcctctaaacgggtcttgaggggttttttgctgaacgtacgttttacggctagctcagtcctaggtactatgctagcgtggagatatacggtaccaaggaggtaaataatgggagactacaaagaccatgacggtgattataaagatcatgacatcgattacaaggatgacgatgacaagggaggatccggcagcatgggaaaatcaacactaaagcacactaggaagattcagatcttgatcgacctgccgacgaaagacgagaagaaagaggttatggatatgatgtatcagtggcgtgatcgttgcttccgcgcagcgaacattatcgtgacccatctgtacgttcaggagatgatcaaggacttcttttatctgagcgaaggtattaagtacaaactcgcggatgagaaaaaagacgaaaagggcatcctgcaacgtagccgtatgaacaccacctatcgcgtggtgagcgaccgttttaagggcgagatgccgacgaatatcctttccaccctgaaccacggcctgatcagcagctttaacaaaaaccgcgtccagtattggaaaggcgaacgtagcctgccaaatttcaaaaaggacatggcattcccgtttggtctgcaaggtatctctcgtctggtgtatgatgaagaaaaaaaggcgttctgctttagattgtaccgcgttccgtttaaaacgtacttgggtaaggacttcaccgataaacgcatgctgctggagcgcctagtcaaaggagacgttaagctgtgtgcgtcgaacattcaactgaatggtggtaagatcttttggctggctgtattcgaaattgaaaaggagaagcacagcctcaaaccggaagtgattgccgaagcttcgctctccttggagtatccgattgttgtgaagactggtaagaaccgtctgaccattggtactaaagaagagttcctgtaccgcagattggcgattcaagcggcgcgtcgtcgtacccaggttggtgcaacctacagccgttctggtaagggtaagaagcgcaaattaaaagccgtcgataaataccataaaacggaatcaaactatgtggcgcatcgtattcacgtttacagccgtaagttaatcgatttctgcattaaacaccaagcgggcaccctgatccttatgaatcaggaggacaaagttggcatcgccaaagaggaggagttcgtgctgcgtaattggtcctattacgaactgatgaccaaaatcaagtacaaagctgagaaggctggcatcgaattgattatcggctaaggctccggaagaaggagatatacatatgttatattcagattttgaattgctaaaaattggcgacactagtgcgttggaccatatccatgcaaaatactttcgttccatcctgtggatcggccgtcagtggctgaacgatgattttttgatcgagtctctggttcaggatacgtttctaaagctgtgggttaatagagataagctggaaagcccggaacacattttttacttcttgcgtttcgtgatgaagcgcgagtgcattagctattaccgtaaaccaaaatacaaatttcataaaaaagtgaacagcttggaggattacgacaactatcaggactatatggtgggttatgatccggttaacgactctgagaacctggacgaacaagaaagcacccagaaatccttcgaccacattaaatcgattcttccgctgctgaatgcggataagcgccatctgatcgagttatgtctgaagtacggtttccaatataaggcgatcagcaaagttatgggtaaaggtattcacgaaaccagccgtgaaatcaaagaagccatcgaggacatcaagaccattgtccacaagggcaacgagctcggcagcaatgacaccatgaccaatgaaatcaagtttagcggtgaattatccgaggaacaggctaaggtgctgaagatgcgctgcgatttgaagtacagcttctctgagattgccaaggagctggaactgtccgagaaagaggtacaccaagagttcatgaaggcatataaactgatgaaagcgaaccaccagttgcaactgcaaagcgcgtaagtccttaagccaaggagacgtaccatgctaatggctgataagaacacaaataaatcgaaggtctatttcagcgataaatacgtgtgcaagttcatcagcgaagagtggctgaccagcaaggacacctccgcgcgtaaatacggtaaaatctacggcgtgaactaccatgttattgaaaagatccagcaagagaatggttataacattccgctgagcaccctgtctacgatttgttttaaccacggcatcaaattgtccgacttctttaaattggttgagaagaagtacggtgaatttctgaatgatagctatgagtataaataataagaattcctgctgccaccgctgagcaataactagcataaccccttggggcctctaaacgggtcttgaggggttttttgctgaaacctcaggcatttgagaagcacacggtcacactgcttccggtagtcaataaaccggtaaaccagcaatagacataagcggctatttaacgaccctgccctgaaccgacgaccgggtcatcgtggccggatcttgcggcccctcggcttgaacgaattgttagacattatttgccgactaccttggtgatctcgcctttcacgtagtggacaaattcttccaactgatctgcgcgcgaggccaagcgatcttcttcttgtccaagataagcctgtctagcttcaagtatgacgggctgatactgggccggcaggcgctccattgcccagtcggcagcgacatccttcggcgcgattttgccggttactgcgctgtaccaaatgcgggacaacgtaagcactacatttcgctcatcgccagcccagtcgggcggcgagttccatagcgttaaggtttcatttagcgcctcaaatagatcctgttcaggaaccggatcaaagagttcctccgccgctggacctaccaaggcaacgctatgttctcttgcttttgtcagcaagatagccagatcaatgtcgatcgtggctggctcgaagatacctgcaagaatgtcattgcgctgccattctccaaattgcagttcgcgcttagctggataacgccacggaatgatgtcgtcgtgcacaacaatggtgacttctacagcgcggagaatctcgctctctccaggggaagccgaagtttccaaaaggtcgttgatcaaagctcgccgcgttgtttcatcaagccttacggtcaccgtaaccagcaaatcaatatcactgtgtggcttcaggccgccatccactgcggagccgtacaaatgtacggccagcaacgtcggttcgagatggcgctcgatgacgccaactacctctgatagttgagtcgatacttcggcgatcaccgcttccctcatactcttcctttttcaatattattgaagcatttatcagggttattgtctcatgagcggatacatatttgaatgtatttagaaaaataaacaaatagctagctcactcggtcgctacgctccgggcgtgagactgcggcgggcgctgcggacacatacaaagttacccacagattccgtggataagcaggggactaacatgtgaggcaaaacagcagggccgcgccggtggcgtttttccataggctccgccctcctgccagagttcacataaacagacgcttttccggtgcatctgtgggagccgtgaggctcaaccatgaatctgacagtacgggcgaaacccgacaggacttaaagatccccaccgtttccggcgggtcgctccctcttgcgctctcctgttccgaccctgccgtttaccggatacctgttccgcctttctcccttacgggaagtgtggcgctttctcatagctcacacactggtatctcggctcggtgtaggtcgttcgctccaagctgggctgtaagcaagaactccccgttcagcccgactgctgcgccttatccggtaactgttcacttgagtccaacccggaaaagcacggtaaaacgccactggcagcagccattggtaactgggagttcgcagaggatttgtttagctaaacacgcggttgctcttgaagtgtgcgccaaagtccggctacactggaaggacagatttggttgctgtgctctgcgaaagccagttaccacggttaagcagttccccaactgacttaaccttcgatcaaaccacctccccaggtggttttttcgtttacagggcaaaagattacgcgcagaaaaaaaggatctcaagaagatcctttgatcttttctactgaaccgctctagatttcagtgcaatttatctcttcaaatgtagcacctgaagtcagccccatacgatataagttgtaattctcatgttagtcatgccccgcgcccaccggaaggagctgactgggttgaaggctctcaagggcatcggtcgagatcccggtgcctaatgagtgagctaacttacattaattgcgttgcgctcactgcccgctttccagtcgggaaacctgtcgtgccagctgcattaatgaatcggccaacgcgcggggagaggcggtttgcgtattgggcgccagggtggtttttcttttcaccagtgagacgggcaacagctgattgcccttcaccgcctggccctgagagagttgcagcaagcggtccacgctggtttgccccagcaggcgaaaatcctgtttgatggtggttaacggcgggatataacatgagctgtcttcggtatcgtcgtatcccactaccgagatgtccgcaccaacgcgcagcccggactcggtaatggcgcgcattgcgcccagcgccatctgatcgttggcaaccagcatcgcagtgggaacgatgccctcattcagcatttgcatggtttgttgaaaaccggacatggcactccagtcgccttcccgttccgctatcggctgaatttgattgcgagtgagatatttatgccagccagccagacgcagacgcgccgagacagaacttaatgggcccgctaacagcgcgatttgctggtgacccaatgcgaccagatgctccacgcccagtcgcgtaccgtcttcatgggagaaaataatactgttgatgggtgtctggtcagagacatcaagaaataacgccggaacattagtgcaggcagcttccacagcaatggcatcctggtcatccagcggatagttaatgatcagcccactgacgcgttgcgcgagaagattgtgcaccgccgctttacaggcttcgacgccgcttcgttctaccatcgacaccaccacgctggcacccagttgatcggcgcgagatttaatcgccgcgacaatttgcgacggcgcgtgcagggccagactggaggtggcaacgccaatcagcaacgactgtttgcccgccagttgttgtgccacgcggttgggaatgtaattcagctccgccatcgccgcttccactttttcccgcgttttcgcagaaacgtggctggcctggttcaccacgcgggaaacggtctgataagagacaccggcatactctgcgacatcgtataacgttactggtttcac

SEQ ID NO: 5956 - DNA, 6842 bp, synthetic construct
  source 1..6842: mol_type = other DNA
attcaccaccctgaattgactctcttccgggcgctatcatgccataccgcgaaaggttttgcgccattcgatggtgtccgggattgacagctagctcagtcctaggtataatgctagcgtggagatatacctcgagcaattagattttgagggtgcttgtacacccatagggtgaggttaagaattacactcactaagtgtgaacaacacatacaacctcccttaacttgccctcatatagcaatcaataagcctaaatacgggcacctaaatacaatatgggacaaacaccgataaagtttttttgaacgattgaaaatggatacttttaatgaagtgtccagaaatcgtcaaatattagatagaacccttgggatattgcttctccttataggtatcgcaattgggattttccttattcctgattttttaccactacttaaaaggactccttatttattgctcgaacccgatgcaggtgtaagacatgagcttggatacgcttggtttatgcaatcaattggttggatcattgcttttttcgcatttaggagcagtagggcatttttaagggatagcaagaaaccaactagtaccagtaattaaatcaaaggtgaaagaggtatatagttgcctaaacaccatatacaactcactgaaaaaccgctccgaaacgcaatattctgtgatgacagccattcatccggtaggctaaagtatgtaaaaagaagctaatgtcatcttcccttttctcctcgaggcggccgcaaatgaaaaaattacaagaagtttttttgagagcgttcgctctcatttaggggtttttattatatttatccctgaaataacatatttgcgaaacttgttaagttaataatattagaagcattcgctttgattctcgcatcaaaaactggtaatttttaacgacgagatgataagtgcaaatgctcacggcccgggcgtgagcttacttattgtcgtgcggtataccagtaccttgatgctataggttaagttttcacgccctctttatcttatttaaaaagggctttctcaacttttcaaagctatcttctctttatccttttttaagaaatcgcatcagctttaaaagcataatcaattttaaccatggtgcattgaccatcttaaacgaggcctgttgcggccgcaataatagactagcataaccccttggggcctctaaacgggtcttgaggggttttttgctgaacgtacgttttacggctagctcagtcctaggtactatgctagcgtggagatatacggtaccaaggaggtaaataatgggaaaatcaacactaaagcacactaggaagattcagatcttgatcgacctgccgacgaaagacgagaagaaagaggttatggatatgatgtatcagtggcgtgatcgttgcttccgcgcagcgaacattatcgtgacccatctgtacgttcaggagatgatcaaggacttcttttatctgagcgaaggtattaagtacaaactcgcggatgagaaaaaagacgaaaagggcatcctgcaacgtagccgtatgaacaccacctatcgcgtggtgagcgaccgttttaagggcgagatgccgacgaatatcctttccaccctgaaccacggcctgatcagcagctttaacaaaaaccgcgtccagtattggaaaggcgaacgtagcctgccaaatttcaaaaaggacatggcattcccgtttggtctgcaaggtatctctcgtctggtgtatgatgaagaaaaaaaggcgttctgctttagattgtaccgcgttccgtttaaaacgtacttgggtaaggacttcaccgataaacgcatgctgctggagcgcctagtcaaaggagacgttaagctgtgtgcgtcgaacattcaactgaatggtggtaagatcttttggctggctgtattcgaaattgaaaaggagaagcacagcctcaaaccggaagtgattgccgaagcttcgctctccttggagtatccgattgttgtgaagactggtaagaaccgtctgaccattggtactaaagaagagttcctgtaccgcagattggcgattcaagcggcgcgtcgtcgtacccaggttggtgcaacctacagccgttctggtaagggtaagaagcgcaaattaaaagccgtcgataaataccataaaacggaatcaaactatgtggcgcatcgtattcacgtttacagccgtaagttaatcgatttctgcattaaacaccaagcgggcaccctgatccttatgaatcaggaggacaaagttggcatcgccaaagaggaggagttcgtgctgcgtaattggtcctattacgaactgatgaccaaaatcaagtacaaagctgagaaggctggcatcgaattgattatcggctaaggctccggaagaaggagatatacatatgggagactacaaagaccatgacggtgattataaagatcatgacatcgattacaaggatgacgatgacaagggaggatccggcagcatgttatattcagattttgaattgctaaaaattggcgacactagtgcgttggaccatatccatgcaaaatactttcgttccatcctgtggatcggccgtcagtggctgaacgatgattttttgatcgagtctctggttcaggatacgtttctaaagctgtgggttaatagagataagctggaaagcccggaacacattttttacttcttgcgtttcgtgatgaagcgcgagtgcattagctattaccgtaaaccaaaatacaaatttcataaaaaagtgaacagcttggaggattacgacaactatcaggactatatggtgggttatgatccggttaacgactctgagaacctggacgaacaagaaagcacccagaaatccttcgaccacattaaatcgattcttccgctgctgaatgcggataagcgccatctgatcgagttatgtctgaagtacggtttccaatataaggcgatcagcaaagttatgggtaaaggtattcacgaaaccagccgtgaaatcaaagaagccatcgaggacatcaagaccattgtccacaagggcaacgagctcggcagcaatgacaccatgaccaatgaaatcaagtttagcggtgaattatccgaggaacaggctaaggtgctgaagatgcgctgcgatttgaagtacagcttctctgagattgccaaggagctggaactgtccgagaaagaggtacaccaagagttcatgaaggcatataaactgatgaaagcgaaccaccagttgcaactgcaaagcgcgtaagtccttaagccaaggagacgtaccatgctaatggctgataagaacacaaataaatcgaaggtctatttcagcgataaatacgtgtgcaagttcatcagcgaagagtggctgaccagcaaggacacctccgcgcgtaaatacggtaaaatctacggcgtgaactaccatgttattgaaaagatccagcaagagaatggttataacattccgctgagcaccctgtctacgatttgttttaaccacggcatcaaattgtccgacttctttaaattggttgagaagaagtacggtgaatttctgaatgatagctatgagtataaataataagaattcctgctgccaccgctgagcaataactagcataaccccttggggcctctaaacgggtcttgaggggttttttgctgaaacctcaggcatttgagaagcacacggtcacactgcttccggtagtcaataaaccggtaaaccagcaatagacataagcggctatttaacgaccctgccctgaaccgacgaccgggtcatcgtggccggatcttgcggcccctcggcttgaacgaattgttagacattatttgccgactaccttggtgatctcgcctttcacgtagtggacaaattcttccaactgatctgcgcgcgaggccaagcgatcttcttcttgtccaagataagcctgtctagcttcaagtatgacgggctgatactgggccggcaggcgctccattgcccagtcggcagcgacatccttcggcgcgattttgccggttactgcgctgtaccaaatgcgggacaacgtaagcactacatttcgctcatcgccagcccagtcgggcggcgagttccatagcgttaaggtttcatttagcgcctcaaatagatcctgttcaggaaccggatcaaagagttcctccgccgctggacctaccaaggcaacgctatgttctcttgcttttgtcagcaagatagccagatcaatgtcgatcgtggctggctcgaagatacctgcaagaatgtcattgcgctgccattctccaaattgcagttcgcgcttagctggataacgccacggaatgatgtcgtcgtgcacaacaatggtgacttctacagcgcggagaatctcgctctctccaggggaagccgaagtttccaaaaggtcgttgatcaaagctcgccgcgttgtttcatcaagccttacggtcaccgtaaccagcaaatcaatatcactgtgtggcttcaggccgccatccactgcggagccgtacaaatgtacggccagcaacgtcggttcgagatggcgctcgatgacgccaactacctctgatagttgagtcgatacttcggcgatcaccgcttccctcatactcttcctttttcaatattattgaagcatttatcagggttattgtctcatgagcggatacatatttgaatgtatttagaaaaataaacaaatagctagctcactcggtcgctacgctccgggcgtgagactgcggcgggcgctgcggacacatacaaagttacccacagattccgtggataagcaggggactaacatgtgaggcaaaacagcagggccgcgccggtggcgtttttccataggctccgccctcctgccagagttcacataaacagacgcttttccggtgcatctgtgggagccgtgaggctcaaccatgaatctgacagtacgggcgaaacccgacaggacttaaagatccccaccgtttccggcgggtcgctccctcttgcgctctcctgttccgaccctgccgtttaccggatacctgttccgcctttctcccttacgggaagtgtggcgctttctcatagctcacacactggtatctcggctcggtgtaggtcgttcgctccaagctgggctgtaagcaagaactccccgttcagcccgactgctgcgccttatccggtaactgttcacttgagtccaacccggaaaagcacggtaaaacgccactggcagcagccattggtaactgggagttcgcagaggatttgtttagctaaacacgcggttgctcttgaagtgtgcgccaaagtccggctacactggaaggacagatttggttgctgtgctctgcgaaagccagttaccacggttaagcagttccccaactgacttaaccttcgatcaaaccacctccccaggtggttttttcgtttacagggcaaaagattacgcgcagaaaaaaaggatctcaagaagatcctttgatcttttctactgaaccgctctagatttcagtgcaatttatctcttcaaatgtagcacctgaagtcagccccatacgatataagttgtaattctcatgttagtcatgccccgcgcccaccggaaggagctgactgggttgaaggctctcaagggcatcggtcgagatcccggtgcctaatgagtgagctaacttacattaattgcgttgcgctcactgcccgctttccagtcgggaaacctgtcgtgccagctgcattaatgaatcggccaacgcgcggggagaggcggtttgcgtattgggcgccagggtggtttttcttttcaccagtgagacgggcaacagctgattgcccttcaccgcctggccctgagagagttgcagcaagcggtccacgctggtttgccccagcaggcgaaaatcctgtttgatggtggttaacggcgggatataacatgagctgtcttcggtatcgtcgtatcccactaccgagatgtccgcaccaacgcgcagcccggactcggtaatggcgcgcattgcgcccagcgccatctgatcgttggcaaccagcatcgcagtgggaacgatgccctcattcagcatttgcatggtttgttgaaaaccggacatggcactccagtcgccttcccgttccgctatcggctgaatttgattgcgagtgagatatttatgccagccagccagacgcagacgcgccgagacagaacttaatgggcccgctaacagcgcgatttgctggtgacccaatgcgaccagatgctccacgcccagtcgcgtaccgtcttcatgggagaaaataatactgttgatgggtgtctggtcagagacatcaagaaataacgccggaacattagtgcaggcagcttccacagcaatggcatcctggtcatccagcggatagttaatgatcagcccactgacgcgttgcgcgagaagattgtgcaccgccgctttacaggcttcgacgccgcttcgttctaccatcgacaccaccacgctggcacccagttgatcggcgcgagatttaatcgccgcgacaatttgcgacggcgcgtgcagggccagactggaggtggcaacgccaatcagcaacgactgtttgcccgccagttgttgtgccacgcggttgggaatgtaattcagctccgccatcgccgcttccactttttcccgcgttttcgcagaaacgtggctggcctggttcaccacgcgggaaacggtctgataagagacaccggcatactctgcgacatcgtataacgttactggtttcac

SEQ ID NO: 5957 - DNA, 6842 bp, synthetic construct
  source 1..6842: mol_type = other DNA
attcaccaccctgaattgactctcttccgggcgctatcatgccataccgcgaaaggttttgcgccattcgatggtgtccgggattgacagctagctcagtcctaggtataatgctagcgtggagatatacctcgagcaattagattttgagggtgcttgtacacccatagggtgaggttaagaattacactcactaagtgtgaacaacacatacaactctctcttgccgttaaaaatatagcaatcaataagcctaaatacgggcacctaaatacaatatgggacaaacaccgataaagtttttttgaacgattgaaaatggatacttttaatgaagtgtccagaaatcgtcaaatattagatagaacccttgggatattgcttctccttataggtatcgcaattgggattttccttattcctgattttttaccactacttaaaaggactccttatttattgctcgaacccgatgcaggtgtaagacatgagcttggatacgcttggtttatgcaatcaattggttggatcattgcttttttcgcatttaggagcagtagggcatttttaagggatagcaagaaaccaactagtaccagtaattaaatcaaaggtgaaagaggtatatagttgcctaaacaccatatacaactcactgaaaaaccgctccgaaacgcaatattctgtgatgacagccattcatccggtaggctaaagtatgtaaaaagaagctaatgtcatcttcccttttctcctcgaggcggccgcaaatgaaaaaattacaagaagtttttttgagagcgttcgctctcatttaggggtttttattatatttatccctgaaataacatatttgcgaaacttgttaagttaataatattagaagcattcgctttgattctcgcatcaaaaactggtaatttttaacgacgagatgataagtgcaaatgctcacggcccgggcgtgagcttacttattgtcgtgcggtataccagtaccttgatgctataggttaagttttcacgccctctttatcttatttaaaaagggctttctcaacttttcaaagctatcttctctttatccttttttaagaaatcgcatcagctttaaaagcataatcaattttaaccatggtgcattgaccatcttaaacgaggcctgttgcggccgcaataatagactagcataaccccttggggcctctaaacgggtcttgaggggttttttgctgaacgtacgttttacggctagctcagtcctaggtactatgctagcgtggagatatacggtaccaaggaggtaaataatgggaaaatcaacactaaagcacactaggaagattcagatcttgatcgacctgccgacgaaagacgagaagaaagaggttatggatatgatgtatcagtggcgtgatcgttgcttccgcgcagcgaacattatcgtgacccatctgtacgttcaggagatgatcaaggacttcttttatctgagcgaaggtattaagtacaaactcgcggatgagaaaaaagacgaaaagggcatcctgcaacgtagccgtatgaacaccacctatcgcgtggtgagcgaccgttttaagggcgagatgccgacgaatatcctttccaccctgaaccacggcctgatcagcagctttaacaaaaaccgcgtccagtattggaaaggcgaacgtagcctgccaaatttcaaaaaggacatggcattcccgtttggtctgcaaggtatctctcgtctggtgtatgatgaagaaaaaaaggcgttctgctttagattgtaccgcgttccgtttaaaacgtacttgggtaaggacttcaccgataaacgcatgctgctggagcgcctagtcaaaggagacgttaagctgtgtgcgtcgaacattcaactgaatggtggtaagatcttttggctggctgtattcgaaattgaaaaggagaagcacagcctcaaaccggaagtgattgccgaagcttcgctctccttggagtatccgattgttgtgaagactggtaagaaccgtctgaccattggtactaaagaagagttcctgtaccgcagattggcgattcaagcggcgcgtcgtcgtacccaggttggtgcaacctacagccgttctggtaagggtaagaagcgcaaattaaaagccgtcgataaataccataaaacggaatcaaactatgtggcgcatcgtattcacgtttacagccgtaagttaatcgatttctgcattaaacaccaagcgggcaccctgatccttatgaatcaggaggacaaagttggcatcgccaaagaggaggagttcgtgctgcgtaattggtcctattacgaactgatgaccaaaatcaagtacaaagctgagaaggctggcatcgaattgattatcggctaaggctccggaagaaggagatatacatatgggagactacaaagaccatgacggtgattataaagatcatgacatcgattacaaggatgacgatgacaagggaggatccggcagcatgttatattcagattttgaattgctaaaaattggcgacactagtgcgttggaccatatccatgcaaaatactttcgttccatcctgtggatcggccgtcagtggctgaacgatgattttttgatcgagtctctggttcaggatacgtttctaaagctgtgggttaatagagataagctggaaagcccggaacacattttttacttcttgcgtttcgtgatgaagcgcgagtgcattagctattaccgtaaaccaaaatacaaatttcataaaaaagtgaacagcttggaggattacgacaactatcaggactatatggtgggttatgatccggttaacgactctgagaacctggacgaacaagaaagcacccagaaatccttcgaccacattaaatcgattcttccgctgctgaatgcggataagcgccatctgatcgagttatgtctgaagtacggtttccaatataaggcgatcagcaaagttatgggtaaaggtattcacgaaaccagccgtgaaatcaaagaagccatcgaggacatcaagaccattgtccacaagggcaacgagctcggcagcaatgacaccatgaccaatgaaatcaagtttagcggtgaattatccgaggaacaggctaaggtgctgaagatgcgctgcgatttgaagtacagcttctctgagattgccaaggagctggaactgtccgagaaagaggtacaccaagagttcatgaaggcatataaactgatgaaagcgaaccaccagttgcaactgcaaagcgcgtaagtccttaagccaaggagacgtaccatgctaatggctgataagaacacaaataaatcgaaggtctatttcagcgataaatacgtgtgcaagttcatcagcgaagagtggctgaccagcaaggacacctccgcgcgtaaatacggtaaaatctacggcgtgaactaccatgttattgaaaagatccagcaagagaatggttataacattccgctgagcaccctgtctacgatttgttttaaccacggcatcaaattgtccgacttctttaaattggttgagaagaagtacggtgaatttctgaatgatagctatgagtataaataataagaattcctgctgccaccgctgagcaataactagcataaccccttggggcctctaaacgggtcttgaggggttttttgctgaaacctcaggcatttgagaagcacacggtcacactgcttccggtagtcaataaaccggtaaaccagcaatagacataagcggctatttaacgaccctgccctgaaccgacgaccgggtcatcgtggccggatcttgcggcccctcggcttgaacgaattgttagacattatttgccgactaccttggtgatctcgcctttcacgtagtggacaaattcttccaactgatctgcgcgcgaggccaagcgatcttcttcttgtccaagataagcctgtctagcttcaagtatgacgggctgatactgggccggcaggcgctccattgcccagtcggcagcgacatccttcggcgcgattttgccggttactgcgctgtaccaaatgcgggacaacgtaagcactacatttcgctcatcgccagcccagtcgggcggcgagttccatagcgttaaggtttcatttagcgcctcaaatagatcctgttcaggaaccggatcaaagagttcctccgccgctggacctaccaaggcaacgctatgttctcttgcttttgtcagcaagatagccagatcaatgtcgatcgtggctggctcgaagatacctgcaagaatgtcattgcgctgccattctccaaattgcagttcgcgcttagctggataacgccacggaatgatgtcgtcgtgcacaacaatggtgacttctacagcgcggagaatctcgctctctccaggggaagccgaagtttccaaaaggtcgttgatcaaagctcgccgcgttgtttcatcaagccttacggtcaccgtaaccagcaaatcaatatcactgtgtggcttcaggccgccatccactgcggagccgtacaaatgtacggccagcaacgtcggttcgagatggcgctcgatgacgccaactacctctgatagttgagtcgatacttcggcgatcaccgcttccctcatactcttcctttttcaatattattgaagcatttatcagggttattgtctcatgagcggatacatatttgaatgtatttagaaaaataaacaaatagctagctcactcggtcgctacgctccgggcgtgagactgcggcgggcgctgcggacacatacaaagttacccacagattccgtggataagcaggggactaacatgtgaggcaaaacagcagggccgcgccggtggcgtttttccataggctccgccctcctgccagagttcacataaacagacgcttttccggtgcatctgtgggagccgtgaggctcaaccatgaatctgacagtacgggcgaaacccgacaggacttaaagatccccaccgtttccggcgggtcgctccctcttgcgctctcctgttccgaccctgccgtttaccggatacctgttccgcctttctcccttacgggaagtgtggcgctttctcatagctcacacactggtatctcggctcggtgtaggtcgttcgctccaagctgggctgtaagcaagaactccccgttcagcccgactgctgcgccttatccggtaactgttcacttgagtccaacccggaaaagcacggtaaaacgccactggcagcagccattggtaactgggagttcgcagaggatttgtttagctaaacacgcggttgctcttgaagtgtgcgccaaagtccggctacactggaaggacagatttggttgctgtgctctgcgaaagccagttaccacggttaagcagttccccaactgacttaaccttcgatcaaaccacctccccaggtggttttttcgtttacagggcaaaagattacgcgcagaaaaaaaggatctcaagaagatcctttgatcttttctactgaaccgctctagatttcagtgcaatttatctcttcaaatgtagcacctgaagtcagccccatacgatataagttgtaattctcatgttagtcatgccccgcgcccaccggaaggagctgactgggttgaaggctctcaagggcatcggtcgagatcccggtgcctaatgagtgagctaacttacattaattgcgttgcgctcactgcccgctttccagtcgggaaacctgtcgtgccagctgcattaatgaatcggccaacgcgcggggagaggcggtttgcgtattgggcgccagggtggtttttcttttcaccagtgagacgggcaacagctgattgcccttcaccgcctggccctgagagagttgcagcaagcggtccacgctggtttgccccagcaggcgaaaatcctgtttgatggtggttaacggcgggatataacatgagctgtcttcggtatcgtcgtatcccactaccgagatgtccgcaccaacgcgcagcccggactcggtaatggcgcgcattgcgcccagcgccatctgatcgttggcaaccagcatcgcagtgggaacgatgccctcattcagcatttgcatggtttgttgaaaaccggacatggcactccagtcgccttcccgttccgctatcggctgaatttgattgcgagtgagatatttatgccagccagccagacgcagacgcgccgagacagaacttaatgggcccgctaacagcgcgatttgctggtgacccaatgcgaccagatgctccacgcccagtcgcgtaccgtcttcatgggagaaaataatactgttgatgggtgtctggtcagagacatcaagaaataacgccggaacattagtgcaggcagcttccacagcaatggcatcctggtcatccagcggatagttaatgatcagcccactgacgcgttgcgcgagaagattgtgcaccgccgctttacaggcttcgacgccgcttcgttctaccatcgacaccaccacgctggcacccagttgatcggcgcgagatttaatcgccgcgacaatttgcgacggcgcgtgcagggccagactggaggtggcaacgccaatcagcaacgactgtttgcccgccagttgttgtgccacgcggttgggaatgtaattcagctccgccatcgccgcttccactttttcccgcgttttcgcagaaacgtggctggcctggttcaccacgcgggaaacggtctgataagagacaccggcatactctgcgacatcgtataacgttactggtttcac

SEQ ID NO: 5958 - DNA, 6842 bp, synthetic construct
  source 1..6842: mol_type = other DNA
attcaccaccctgaattgactctcttccgggcgctatcatgccataccgcgaaaggttttgcgccattcgatggtgtccgggattgacagctagctcagtcctaggtataatgctagcgtggagatatacctcgagcaattagattttgagggtgcttgtacacccatagggtgaggttaagaattacactcactaagtgtgaacaacacatacaaccagaaatttgcacagtgcgcatagcaatcaataagcctaaatacgggcacctaaatacaatatgggacaaacaccgataaagtttttttgaacgattgaaaatggatacttttaatgaagtgtccagaaatcgtcaaatattagatagaacccttgggatattgcttctccttataggtatcgcaattgggattttccttattcctgattttttaccactacttaaaaggactccttatttattgctcgaacccgatgcaggtgtaagacatgagcttggatacgcttggtttatgcaatcaattggttggatcattgcttttttcgcatttaggagcagtagggcatttttaagggatagcaagaaaccaactagtaccagtaattaaatcaaaggtgaaagaggtatatagttgcctaaacaccatatacaactcactgaaaaaccgctccgaaacgcaatattctgtgatgacagccattcatccggtaggctaaagtatgtaaaaagaagctaatgtcatcttcccttttctcctcgaggcggccgcaaatgaaaaaattacaagaagtttttttgagagcgttcgctctcatttaggggtttttattatatttatccctgaaataacatatttgcgaaacttgttaagttaataatattagaagcattcgctttgattctcgcatcaaaaactggtaatttttaacgacgagatgataagtgcaaatgctcacggcccgggcgtgagcttacttattgtcgtgcggtataccagtaccttgatgctataggttaagttttcacgccctctttatcttatttaaaaagggctttctcaacttttcaaagctatcttctctttatccttttttaagaaatcgcatcagctttaaaagcataatcaattttaaccatggtgcattgaccatcttaaacgaggcctgttgcggccgcaataatagactagcataaccccttggggcctctaaacgggtcttgaggggttttttgctgaacgtacgttttacggctagctcagtcctaggtactatgctagcgtggagatatacggtaccaaggaggtaaataatgggaaaatcaacactaaagcacactaggaagattcagatcttgatcgacctgccgacgaaagacgagaagaaagaggttatggatatgatgtatcagtggcgtgatcgttgcttccgcgcagcgaacattatcgtgacccatctgtacgttcaggagatgatcaaggacttcttttatctgagcgaaggtattaagtacaaactcgcggatgagaaaaaagacgaaaagggcatcctgcaacgtagccgtatgaacaccacctatcgcgtggtgagcgaccgttttaagggcgagatgccgacgaatatcctttccaccctgaaccacggcctgatcagcagctttaacaaaaaccgcgtccagtattggaaaggcgaacgtagcctgccaaatttcaaaaaggacatggcattcccgtttggtctgcaaggtatctctcgtctggtgtatgatgaagaaaaaaaggcgttctgctttagattgtaccgcgttccgtttaaaacgtacttgggtaaggacttcaccgataaacgcatgctgctggagcgcctagtcaaaggagacgttaagctgtgtgcgtcgaacattcaactgaatggtggtaagatcttttggctggctgtattcgaaattgaaaaggagaagcacagcctcaaaccggaagtgattgccgaagcttcgctctccttggagtatccgattgttgtgaagactggtaagaaccgtctgaccattggtactaaagaagagttcctgtaccgcagattggcgattcaagcggcgcgtcgtcgtacccaggttggtgcaacctacagccgttctggtaagggtaagaagcgcaaattaaaagccgtcgataaataccataaaacggaatcaaactatgtggcgcatcgtattcacgtttacagccgtaagttaatcgatttctgcattaaacaccaagcgggcaccctgatccttatgaatcaggaggacaaagttggcatcgccaaagaggaggagttcgtgctgcgtaattggtcctattacgaactgatgaccaaaatcaagtacaaagctgagaaggctggcatcgaattgattatcggctaaggctccggaagaaggagatatacatatgggagactacaaagaccatgacggtgattataaagatcatgacatcgattacaaggatgacgatgacaagggaggatccggcagcatgttatattcagattttgaattgctaaaaattggcgacactagtgcgttggaccatatccatgcaaaatactttcgttccatcctgtggatcggccgtcagtggctgaacgatgattttttgatcgagtctctggttcaggatacgtttctaaagctgtgggttaatagagataagctggaaagcccggaacacattttttacttcttgcgtttcgtgatgaagcgcgagtgcattagctattaccgtaaaccaaaatacaaatttcataaaaaagtgaacagcttggaggattacgacaactatcaggactatatggtgggttatgatccggttaacgactctgagaacctggacgaacaagaaagcacccagaaatccttcgaccacattaaatcgattcttccgctgctgaatgcggataagcgccatctgatcgagttatgtctgaagtacggtttccaatataaggcgatcagcaaagttatgggtaaaggtattcacgaaaccagccgtgaaatcaaagaagccatcgaggacatcaagaccattgtccacaagggcaacgagctcggcagcaatgacaccatgaccaatgaaatcaagtttagcggtgaattatccgaggaacaggctaaggtgctgaagatgcgctgcgatttgaagtacagcttctctgagattgccaaggagctggaactgtccgagaaagaggtacaccaagagttcatgaaggcatataaactgatgaaagcgaaccaccagttgcaactgcaaagcgcgtaagtccttaagccaaggagacgtaccatgctaatggctgataagaacacaaataaatcgaaggtctatttcagcgataaatacgtgtgcaagttcatcagcgaagagtggctgaccagcaaggacacctccgcgcgtaaatacggtaaaatctacggcgtgaactaccatgttattgaaaagatccagcaagagaatggttataacattccgctgagcaccctgtctacgatttgttttaaccacggcatcaaattgtccgacttctttaaattggttgagaagaagtacggtgaatttctgaatgatagctatgagtataaataataagaattcctgctgccaccgctgagcaataactagcataaccccttggggcctctaaacgggtcttgaggggttttttgctgaaacctcaggcatttgagaagcacacggtcacactgcttccggtagtcaataaaccggtaaaccagcaatagacataagcggctatttaacgaccctgccctgaaccgacgaccgggtcatcgtggccggatcttgcggcccctcggcttgaacgaattgttagacattatttgccgactaccttggtgatctcgcctttcacgtagtggacaaattcttccaactgatctgcgcgcgaggccaagcgatcttcttcttgtccaagataagcctgtctagcttcaagtatgacgggctgatactgggccggcaggcgctccattgcccagtcggcagcgacatccttcggcgcgattttgccggttactgcgctgtaccaaatgcgggacaacgtaagcactacatttcgctcatcgccagcccagtcgggcggcgagttccatagcgttaaggtttcatttagcgcctcaaatagatcctgttcaggaaccggatcaaagagttcctccgccgctggacctaccaaggcaacgctatgttctcttgcttttgtcagcaagatagccagatcaatgtcgatcgtggctggctcgaagatacctgcaagaatgtcattgcgctgccattctccaaattgcagttcgcgcttagctggataacgccacggaatgatgtcgtcgtgcacaacaatggtgacttctacagcgcggagaatctcgctctctccaggggaagccgaagtttccaaaaggtcgttgatcaaagctcgccgcgttgtttcatcaagccttacggtcaccgtaaccagcaaatcaatatcactgtgtggcttcaggccgccatccactgcggagccgtacaaatgtacggccagcaacgtcggttcgagatggcgctcgatgacgccaactacctctgatagttgagtcgatacttcggcgatcaccgcttccctcatactcttcctttttcaatattattgaagcatttatcagggttattgtctcatgagcggatacatatttgaatgtatttagaaaaataaacaaatagctagctcactcggtcgctacgctccgggcgtgagactgcggcgggcgctgcggacacatacaaagttacccacagattccgtggataagcaggggactaacatgtgaggcaaaacagcagggccgcgccggtggcgtttttccataggctccgccctcctgccagagttcacataaacagacgcttttccggtgcatctgtgggagccgtgaggctcaaccatgaatctgacagtacgggcgaaacccgacaggacttaaagatccccaccgtttccggcgggtcgctccctcttgcgctctcctgttccgaccctgccgtttaccggatacctgttccgcctttctcccttacgggaagtgtggcgctttctcatagctcacacactggtatctcggctcggtgtaggtcgttcgctccaagctgggctgtaagcaagaactccccgttcagcccgactgctgcgccttatccggtaactgttcacttgagtccaacccggaaaagcacggtaaaacgccactggcagcagccattggtaactgggagttcgcagaggatttgtttagctaaacacgcggttgctcttgaagtgtgcgccaaagtccggctacactggaaggacagatttggttgctgtgctctgcgaaagccagttaccacggttaagcagttccccaactgacttaaccttcgatcaaaccacctccccaggtggttttttcgtttacagggcaaaagattacgcgcagaaaaaaaggatctcaagaagatcctttgatcttttctactgaaccgctctagatttcagtgcaatttatctcttcaaatgtagcacctgaagtcagccccatacgatataagttgtaattctcatgttagtcatgccccgcgcccaccggaaggagctgactgggttgaaggctctcaagggcatcggtcgagatcccggtgcctaatgagtgagctaacttacattaattgcgttgcgctcactgcccgctttccagtcgggaaacctgtcgtgccagctgcattaatgaatcggccaacgcgcggggagaggcggtttgcgtattgggcgccagggtggtttttcttttcaccagtgagacgggcaacagctgattgcccttcaccgcctggccctgagagagttgcagcaagcggtccacgctggtttgccccagcaggcgaaaatcctgtttgatggtggttaacggcgggatataacatgagctgtcttcggtatcgtcgtatcccactaccgagatgtccgcaccaacgcgcagcccggactcggtaatggcgcgcattgcgcccagcgccatctgatcgttggcaaccagcatcgcagtgggaacgatgccctcattcagcatttgcatggtttgttgaaaaccggacatggcactccagtcgccttcccgttccgctatcggctgaatttgattgcgagtgagatatttatgccagccagccagacgcagacgcgccgagacagaacttaatgggcccgctaacagcgcgatttgctggtgacccaatgcgaccagatgctccacgcccagtcgcgtaccgtcttcatgggagaaaataatactgttgatgggtgtctggtcagagacatcaagaaataacgccggaacattagtgcaggcagcttccacagcaatggcatcctggtcatccagcggatagttaatgatcagcccactgacgcgttgcgcgagaagattgtgcaccgccgctttacaggcttcgacgccgcttcgttctaccatcgacaccaccacgctggcacccagttgatcggcgcgagatttaatcgccgcgacaatttgcgacggcgcgtgcagggccagactggaggtggcaacgccaatcagcaacgactgtttgcccgccagttgttgtgccacgcggttgggaatgtaattcagctccgccatcgccgcttccactttttcccgcgttttcgcagaaacgtggctggcctggttcaccacgcgggaaacggtctgataagagacaccggcatactctgcgacatcgtataacgttactggtttcac

SEQ ID NO: 5959 - DNA, 6842 bp, synthetic construct
  source 1..6842: mol_type = other DNA
attcaccaccctgaattgactctcttccgggcgctatcatgccataccgcgaaaggttttgcgccattcgatggtgtccgggattgacagctagctcagtcctaggtataatgctagcgtggagatatacctcgagcaattagattttgagggtgcttgtacacccatagggtgaggttaagaattacactcactaagtgtgaacaacacatacaacttttgttacctgcctctaacatagcaatcaataagcctaaatacgggcacctaaatacaatatgggacaaacaccgataaagtttttttgaacgattgaaaatggatacttttaatgaagtgtccagaaatcgtcaaatattagatagaacccttgggatattgcttctccttataggtatcgcaattgggattttccttattcctgattttttaccactacttaaaaggactccttatttattgctcgaacccgatgcaggtgtaagacatgagcttggatacgcttggtttatgcaatcaattggttggatcattgcttttttcgcatttaggagcagtagggcatttttaagggatagcaagaaaccaactagtaccagtaattaaatcaaaggtgaaagaggtatatagttgcctaaacaccatatacaactcactgaaaaaccgctccgaaacgcaatattctgtgatgacagccattcatccggtaggctaaagtatgtaaaaagaagctaatgtcatcttcccttttctcctcgaggcggccgcaaatgaaaaaattacaagaagtttttttgagagcgttcgctctcatttaggggtttttattatatttatccctgaaataacatatttgcgaaacttgttaagttaataatattagaagcattcgctttgattctcgcatcaaaaactggtaatttttaacgacgagatgataagtgcaaatgctcacggcccgggcgtgagcttacttattgtcgtgcggtataccagtaccttgatgctataggttaagttttcacgccctctttatcttatttaaaaagggctttctcaacttttcaaagctatcttctctttatccttttttaagaaatcgcatcagctttaaaagcataatcaattttaaccatggtgcattgaccatcttaaacgaggcctgttgcggccgcaataatagactagcataaccccttggggcctctaaacgggtcttgaggggttttttgctgaacgtacgttttacggctagctcagtcctaggtactatgctagcgtggagatatacggtaccaaggaggtaaataatgggaaaatcaacactaaagcacactaggaagattcagatcttgatcgacctgccgacgaaagacgagaagaaagaggttatggatatgatgtatcagtggcgtgatcgttgcttccgcgcagcgaacattatcgtgacccatctgtacgttcaggagatgatcaaggacttcttttatctgagcgaaggtattaagtacaaactcgcggatgagaaaaaagacgaaaagggcatcctgcaacgtagccgtatgaacaccacctatcgcgtggtgagcgaccgttttaagggcgagatgccgacgaatatcctttccaccctgaaccacggcctgatcagcagctttaacaaaaaccgcgtccagtattggaaaggcgaacgtagcctgccaaatttcaaaaaggacatggcattcccgtttggtctgcaaggtatctctcgtctggtgtatgatgaagaaaaaaaggcgttctgctttagattgtaccgcgttccgtttaaaacgtacttgggtaaggacttcaccgataaacgcatgctgctggagcgcctagtcaaaggagacgttaagctgtgtgcgtcgaacattcaactgaatggtggtaagatcttttggctggctgtattcgaaattgaaaaggagaagcacagcctcaaaccggaagtgattgccgaagcttcgctctccttggagtatccgattgttgtgaagactggtaagaaccgtctgaccattggtactaaagaagagttcctgtaccgcagattggcgattcaagcggcgcgtcgtcgtacccaggttggtgcaacctacagccgttctggtaagggtaagaagcgcaaattaaaagccgtcgataaataccataaaacggaatcaaactatgtggcgcatcgtattcacgtttacagccgtaagttaatcgatttctgcattaaacaccaagcgggcaccctgatccttatgaatcaggaggacaaagttggcatcgccaaagaggaggagttcgtgctgcgtaattggtcctattacgaactgatgaccaaaatcaagtacaaagctgagaaggctggcatcgaattgattatcggctaaggctccggaagaaggagatatacatatgggagactacaaagaccatgacggtgattataaagatcatgacatcgattacaaggatgacgatgacaagggaggatccggcagcatgttatattcagattttgaattgctaaaaattggcgacactagtgcgttggaccatatccatgcaaaatactttcgttccatcctgtggatcggccgtcagtggctgaacgatgattttttgatcgagtctctggttcaggatacgtttctaaagctgtgggttaatagagataagctggaaagcccggaacacattttttacttcttgcgtttcgtgatgaagcgcgagtgcattagctattaccgtaaaccaaaatacaaatttcataaaaaagtgaacagcttggaggattacgacaactatcaggactatatggtgggttatgatccggttaacgactctgagaacctggacgaacaagaaagcacccagaaatccttcgaccacattaaatcgattcttccgctgctgaatgcggataagcgccatctgatcgagttatgtctgaagtacggtttccaatataaggcgatcagcaaagttatgggtaaaggtattcacgaaaccagccgtgaaatcaaagaagccatcgaggacatcaagaccattgtccacaagggcaacgagctcggcagcaatgacaccatgaccaatgaaatcaagtttagcggtgaattatccgaggaacaggctaaggtgctgaagatgcgctgcgatttgaagtacagcttctctgagattgccaaggagctggaactgtccgagaaagaggtacaccaagagttcatgaaggcatataaactgatgaaagcgaaccaccagttgcaactgcaaagcgcgtaagtccttaagccaaggagacgtaccatgctaatggctgataagaacacaaataaatcgaaggtctatttcagcgataaatacgtgtgcaagttcatcagcgaagagtggctgaccagcaaggacacctccgcgcgtaaatacggtaaaatctacggcgtgaactaccatgttattgaaaagatccagcaagagaatggttataacattccgctgagcaccctgtctacgatttgttttaaccacggcatcaaattgtccgacttctttaaattggttgagaagaagtacggtgaatttctgaatgatagctatgagtataaataataagaattcctgctgccaccgctgagcaataactagcataaccccttggggcctctaaacgggtcttgaggggttttttgctgaaacctcaggcatttgagaagcacacggtcacactgcttccggtagtcaataaaccggtaaaccagcaatagacataagcggctatttaacgaccctgccctgaaccgacgaccgggtcatcgtggccggatcttgcggcccctcggcttgaacgaattgttagacattatttgccgactaccttggtgatctcgcctttcacgtagtggacaaattcttccaactgatctgcgcgcgaggccaagcgatcttcttcttgtccaagataagcctgtctagcttcaagtatgacgggctgatactgggccggcaggcgctccattgcccagtcggcagcgacatccttcggcgcgattttgccggttactgcgctgtaccaaatgcgggacaacgtaagcactacatttcgctcatcgccagcccagtcgggcggcgagttccatagcgttaaggtttcatttagcgcctcaaatagatcctgttcaggaaccggatcaaagagttcctccgccgctggacctaccaaggcaacgctatgttctcttgcttttgtcagcaagatagccagatcaatgtcgatcgtggctggctcgaagatacctgcaagaatgtcattgcgctgccattctccaaattgcagttcgcgcttagctggataacgccacggaatgatgtcgtcgtgcacaacaatggtgacttctacagcgcggagaatctcgctctctccaggggaagccgaagtttccaaaaggtcgttgatcaaagctcgccgcgttgtttcatcaagccttacggtcaccgtaaccagcaaatcaatatcactgtgtggcttcaggccgccatccactgcggagccgtacaaatgtacggccagcaacgtcggttcgagatggcgctcgatgacgccaactacctctgatagttgagtcgatacttcggcgatcaccgcttccctcatactcttcctttttcaatattattgaagcatttatcagggttattgtctcatgagcggatacatatttgaatgtatttagaaaaataaacaaatagctagctcactcggtcgctacgctccgggcgtgagactgcggcgggcgctgcggacacatacaaagttacccacagattccgtggataagcaggggactaacatgtgaggcaaaacagcagggccgcgccggtggcgtttttccataggctccgccctcctgccagagttcacataaacagacgcttttccggtgcatctgtgggagccgtgaggctcaaccatgaatctgacagtacgggcgaaacccgacaggacttaaagatccccaccgtttccggcgggtcgctccctcttgcgctctcctgttccgaccctgccgtttaccggatacctgttccgcctttctcccttacgggaagtgtggcgctttctcatagctcacacactggtatctcggctcggtgtaggtcgttcgctccaagctgggctgtaagcaagaactccccgttcagcccgactgctgcgccttatccggtaactgttcacttgagtccaacccggaaaagcacggtaaaacgccactggcagcagccattggtaactgggagttcgcagaggatttgtttagctaaacacgcggttgctcttgaagtgtgcgccaaagtccggctacactggaaggacagatttggttgctgtgctctgcgaaagccagttaccacggttaagcagttccccaactgacttaaccttcgatcaaaccacctccccaggtggttttttcgtttacagggcaaaagattacgcgcagaaaaaaaggatctcaagaagatcctttgatcttttctactgaaccgctctagatttcagtgcaatttatctcttcaaatgtagcacctgaagtcagccccatacgatataagttgtaattctcatgttagtcatgccccgcgcccaccggaaggagctgactgggttgaaggctctcaagggcatcggtcgagatcccggtgcctaatgagtgagctaacttacattaattgcgttgcgctcactgcccgctttccagtcgggaaacctgtcgtgccagctgcattaatgaatcggccaacgcgcggggagaggcggtttgcgtattgggcgccagggtggtttttcttttcaccagtgagacgggcaacagctgattgcccttcaccgcctggccctgagagagttgcagcaagcggtccacgctggtttgccccagcaggcgaaaatcctgtttgatggtggttaacggcgggatataacatgagctgtcttcggtatcgtcgtatcccactaccgagatgtccgcaccaacgcgcagcccggactcggtaatggcgcgcattgcgcccagcgccatctgatcgttggcaaccagcatcgcagtgggaacgatgccctcattcagcatttgcatggtttgttgaaaaccggacatggcactccagtcgccttcccgttccgctatcggctgaatttgattgcgagtgagatatttatgccagccagccagacgcagacgcgccgagacagaacttaatgggcccgctaacagcgcgatttgctggtgacccaatgcgaccagatgctccacgcccagtcgcgtaccgtcttcatgggagaaaataatactgttgatgggtgtctggtcagagacatcaagaaataacgccggaacattagtgcaggcagcttccacagcaatggcatcctggtcatccagcggatagttaatgatcagcccactgacgcgttgcgcgagaagattgtgcaccgccgctttacaggcttcgacgccgcttcgttctaccatcgacaccaccacgctggcacccagttgatcggcgcgagatttaatcgccgcgacaatttgcgacggcgcgtgcagggccagactggaggtggcaacgccaatcagcaacgactgtttgcccgccagttgttgtgccacgcggttgggaatgtaattcagctccgccatcgccgcttccactttttcccgcgttttcgcagaaacgtggctggcctggttcaccacgcgggaaacggtctgataagagacaccggcatactctgcgacatcgtataacgttactggtttcac

SEQ ID NO: 5960 - DNA, 6842 bp, synthetic construct
  source 1..6842: mol_type = other DNA
attcaccaccctgaattgactctcttccgggcgctatcatgccataccgcgaaaggttttgcgccattcgatggtgtccgggattgacagctagctcagtcctaggtataatgctagcgtggagatatacctcgagcaattagattttgagggtgcttgtacacccatagggtgaggttaagaattacactcactaagtgtgaacaacacatacaactaccagcgtgatgacgttcgatagcaatcaataagcctaaatacgggcacctaaatacaatatgggacaaacaccgataaagtttttttgaacgattgaaaatggatacttttaatgaagtgtccagaaatcgtcaaatattagatagaacccttgggatattgcttctccttataggtatcgcaattgggattttccttattcctgattttttaccactacttaaaaggactccttatttattgctcgaacccgatgcaggtgtaagacatgagcttggatacgcttggtttatgcaatcaattggttggatcattgcttttttcgcatttaggagcagtagggcatttttaagggatagcaagaaaccaactagtaccagtaattaaatcaaaggtgaaagaggtatatagttgcctaaacaccatatacaactcactgaaaaaccgctccgaaacgcaatattctgtgatgacagccattcatccggtaggctaaagtatgtaaaaagaagctaatgtcatcttcccttttctcctcgaggcggccgcaaatgaaaaaattacaagaagtttttttgagagcgttcgctctcatttaggggtttttattatatttatccctgaaataacatatttgcgaaacttgttaagttaataatattagaagcattcgctttgattctcgcatcaaaaactggtaatttttaacgacgagatgataagtgcaaatgctcacggcccgggcgtgagcttacttattgtcgtgcggtataccagtaccttgatgctataggttaagttttcacgccctctttatcttatttaaaaagggctttctcaacttttcaaagctatcttctctttatccttttttaagaaatcgcatcagctttaaaagcataatcaattttaaccatggtgcattgaccatcttaaacgaggcctgttgcggccgcaataatagactagcataaccccttggggcctctaaacgggtcttgaggggttttttgctgaacgtacgttttacggctagctcagtcctaggtactatgctagcgtggagatatacggtaccaaggaggtaaataatgggaaaatcaacactaaagcacactaggaagattcagatcttgatcgacctgccgacgaaagacgagaagaaagaggttatggatatgatgtatcagtggcgtgatcgttgcttccgcgcagcgaacattatcgtgacccatctgtacgttcaggagatgatcaaggacttcttttatctgagcgaaggtattaagtacaaactcgcggatgagaaaaaagacgaaaagggcatcctgcaacgtagccgtatgaacaccacctatcgcgtggtgagcgaccgttttaagggcgagatgccgacgaatatcctttccaccctgaaccacggcctgatcagcagctttaacaaaaaccgcgtccagtattggaaaggcgaacgtagcctgccaaatttcaaaaaggacatggcattcccgtttggtctgcaaggtatctctcgtctggtgtatgatgaagaaaaaaaggcgttctgctttagattgtaccgcgttccgtttaaaacgtacttgggtaaggacttcaccgataaacgcatgctgctggagcgcctagtcaaaggagacgttaagctgtgtgcgtcgaacattcaactgaatggtggtaagatcttttggctggctgtattcgaaattgaaaaggagaagcacagcctcaaaccggaagtgattgccgaagcttcgctctccttggagtatccgattgttgtgaagactggtaagaaccgtctgaccattggtactaaagaagagttcctgtaccgcagattggcgattcaagcggcgcgtcgtcgtacccaggttggtgcaacctacagccgttctggtaagggtaagaagcgcaaattaaaagccgtcgataaataccataaaacggaatcaaactatgtggcgcatcgtattcacgtttacagccgtaagttaatcgatttctgcattaaacaccaagcgggcaccctgatccttatgaatcaggaggacaaagttggcatcgccaaagaggaggagttcgtgctgcgtaattggtcctattacgaactgatgaccaaaatcaagtacaaagctgagaaggctggcatcgaattgattatcggctaaggctccggaagaaggagatatacatatgggagactacaaagaccatgacggtgattataaagatcatgacatcgattacaaggatgacgatgacaagggaggatccggcagcatgttatattcagattttgaattgctaaaaattggcgacactagtgcgttggaccatatccatgcaaaatactttcgttccatcctgtggatcggccgtcagtggctgaacgatgattttttgatcgagtctctggttcaggatacgtttctaaagctgtgggttaatagagataagctggaaagcccggaacacattttttacttcttgcgtttcgtgatgaagcgcgagtgcattagctattaccgtaaaccaaaatacaaatttcataaaaaagtgaacagcttggaggattacgacaactatcaggactatatggtgggttatgatccggttaacgactctgagaacctggacgaacaagaaagcacccagaaatccttcgaccacattaaatcgattcttccgctgctgaatgcggataagcgccatctgatcgagttatgtctgaagtacggtttccaatataaggcgatcagcaaagttatgggtaaaggtattcacgaaaccagccgtgaaatcaaagaagccatcgaggacatcaagaccattgtccacaagggcaacgagctcggcagcaatgacaccatgaccaatgaaatcaagtttagcggtgaattatccgaggaacaggctaaggtgctgaagatgcgctgcgatttgaagtacagcttctctgagattgccaaggagctggaactgtccgagaaagaggtacaccaagagttcatgaaggcatataaactgatgaaagcgaaccaccagttgcaactgcaaagcgcgtaagtccttaagccaaggagacgtaccatgctaatggctgataagaacacaaataaatcgaaggtctatttcagcgataaatacgtgtgcaagttcatcagcgaagagtggctgaccagcaaggacacctccgcgcgtaaatacggtaaaatctacggcgtgaactaccatgttattgaaaagatccagcaagagaatggttataacattccgctgagcaccctgtctacgatttgttttaaccacggcatcaaattgtccgacttctttaaattggttgagaagaagtacggtgaatttctgaatgatagctatgagtataaataataagaattcctgctgccaccgctgagcaataactagcataaccccttggggcctctaaacgggtcttgaggggttttttgctgaaacctcaggcatttgagaagcacacggtcacactgcttccggtagtcaataaaccggtaaaccagcaatagacataagcggctatttaacgaccctgccctgaaccgacgaccgggtcatcgtggccggatcttgcggcccctcggcttgaacgaattgttagacattatttgccgactaccttggtgatctcgcctttcacgtagtggacaaattcttccaactgatctgcgcgcgaggccaagcgatcttcttcttgtccaagataagcctgtctagcttcaagtatgacgggctgatactgggccggcaggcgctccattgcccagtcggcagcgacatccttcggcgcgattttgccggttactgcgctgtaccaaatgcgggacaacgtaagcactacatttcgctcatcgccagcccagtcgggcggcgagttccatagcgttaaggtttcatttagcgcctcaaatagatcctgttcaggaaccggatcaaagagttcctccgccgctggacctaccaaggcaacgctatgttctcttgcttttgtcagcaagatagccagatcaatgtcgatcgtggctggctcgaagatacctgcaagaatgtcattgcgctgccattctccaaattgcagttcgcgcttagctggataacgccacggaatgatgtcgtcgtgcacaacaatggtgacttctacagcgcggagaatctcgctctctccaggggaagccgaagtttccaaaaggtcgttgatcaaagctcgccgcgttgtttcatcaagccttacggtcaccgtaaccagcaaatcaatatcactgtgtggcttcaggccgccatccactgcggagccgtacaaatgtacggccagcaacgtcggttcgagatggcgctcgatgacgccaactacctctgatagttgagtcgatacttcggcgatcaccgcttccctcatactcttcctttttcaatattattgaagcatttatcagggttattgtctcatgagcggatacatatttgaatgtatttagaaaaataaacaaatagctagctcactcggtcgctacgctccgggcgtgagactgcggcgggcgctgcggacacatacaaagttacccacagattccgtggataagcaggggactaacatgtgaggcaaaacagcagggccgcgccggtggcgtttttccataggctccgccctcctgccagagttcacataaacagacgcttttccggtgcatctgtgggagccgtgaggctcaaccatgaatctgacagtacgggcgaaacccgacaggacttaaagatccccaccgtttccggcgggtcgctccctcttgcgctctcctgttccgaccctgccgtttaccggatacctgttccgcctttctcccttacgggaagtgtggcgctttctcatagctcacacactggtatctcggctcggtgtaggtcgttcgctccaagctgggctgtaagcaagaactccccgttcagcccgactgctgcgccttatccggtaactgttcacttgagtccaacccggaaaagcacggtaaaacgccactggcagcagccattggtaactgggagttcgcagaggatttgtttagctaaacacgcggttgctcttgaagtgtgcgccaaagtccggctacactggaaggacagatttggttgctgtgctctgcgaaagccagttaccacggttaagcagttccccaactgacttaaccttcgatcaaaccacctccccaggtggttttttcgtttacagggcaaaagattacgcgcagaaaaaaaggatctcaagaagatcctttgatcttttctactgaaccgctctagatttcagtgcaatttatctcttcaaatgtagcacctgaagtcagccccatacgatataagttgtaattctcatgttagtcatgccccgcgcccaccggaaggagctgactgggttgaaggctctcaagggcatcggtcgagatcccggtgcctaatgagtgagctaacttacattaattgcgttgcgctcactgcccgctttccagtcgggaaacctgtcgtgccagctgcattaatgaatcggccaacgcgcggggagaggcggtttgcgtattgggcgccagggtggtttttcttttcaccagtgagacgggcaacagctgattgcccttcaccgcctggccctgagagagttgcagcaagcggtccacgctggtttgccccagcaggcgaaaatcctgtttgatggtggttaacggcgggatataacatgagctgtcttcggtatcgtcgtatcccactaccgagatgtccgcaccaacgcgcagcccggactcggtaatggcgcgcattgcgcccagcgccatctgatcgttggcaaccagcatcgcagtgggaacgatgccctcattcagcatttgcatggtttgttgaaaaccggacatggcactccagtcgccttcccgttccgctatcggctgaatttgattgcgagtgagatatttatgccagccagccagacgcagacgcgccgagacagaacttaatgggcccgctaacagcgcgatttgctggtgacccaatgcgaccagatgctccacgcccagtcgcgtaccgtcttcatgggagaaaataatactgttgatgggtgtctggtcagagacatcaagaaataacgccggaacattagtgcaggcagcttccacagcaatggcatcctggtcatccagcggatagttaatgatcagcccactgacgcgttgcgcgagaagattgtgcaccgccgctttacaggcttcgacgccgcttcgttctaccatcgacaccaccacgctggcacccagttgatcggcgcgagatttaatcgccgcgacaatttgcgacggcgcgtgcagggccagactggaggtggcaacgccaatcagcaacgactgtttgcccgccagttgttgtgccacgcggttgggaatgtaattcagctccgccatcgccgcttccactttttcccgcgttttcgcagaaacgtggctggcctggttcaccacgcgggaaacggtctgataagagacaccggcatactctgcgacatcgtataacgttactggtttcac

SEQ ID NO: 5961 - DNA, 6218 bp, synthetic construct
  source 1..6218: mol_type = other DNA
attcaccaccctgaattgactctcttccgggcgctatcatgccataccgcgaaaggttttgcgccattcgatggtgtccgggattgacagctagctcagtcctaggtataatgctagcgtggagatatacctcgaggcggccgcaaatgaaaaaattacaagaagtttttttgagagcgttcgctctcatttaggggtttttattatatttatccctgaaataacatatttgcgaaacttgttaagttaataatattagaagcattcgctttgattctcgcatcaaaaactggtaatttttaacgacgagatgataagtgcaaatgctcacggcccgggcgtgagcttacttattgtcgtgcggtataccagtaccttgatgctataggttaagttttcacgccctctttatcttatttaaaaagggctttctcaacttttcaaagctatcttctctttatccttttttaagaaatcgcatcagctttaaaagcataatcaattttaaccatggtgcattgaccatcttaaacgaggcctgttgcggccgcaataatagactagcataaccccttggggcctctaaacgggtcttgaggggttttttgctgaacgtacgttttacggctagctcagtcctaggtactatgctagcgtggagatatacggtaccaaggaggtaaataatgggagactacaaagaccatgacggtgattataaagatcatgacatcgattacaaggatgacgatgacaagggaggatccggcagcatgggaaaatcaacactaaagcacactaggaagattcagatcttgatcgacctgccgacgaaagacgagaagaaagaggttatggatatgatgtatcagtggcgtgatcgttgcttccgcgcagcgaacattatcgtgacccatctgtacgttcaggagatgatcaaggacttcttttatctgagcgaaggtattaagtacaaactcgcggatgagaaaaaagacgaaaagggcatcctgcaacgtagccgtatgaacaccacctatcgcgtggtgagcgaccgttttaagggcgagatgccgacgaatatcctttccaccctgaaccacggcctgatcagcagctttaacaaaaaccgcgtccagtattggaaaggcgaacgtagcctgccaaatttcaaaaaggacatggcattcccgtttggtctgcaaggtatctctcgtctggtgtatgatgaagaaaaaaaggcgttctgctttagattgtaccgcgttccgtttaaaacgtacttgggtaaggacttcaccgataaacgcatgctgctggagcgcctagtcaaaggagacgttaagctgtgtgcgtcgaacattcaactgaatggtggtaagatcttttggctggctgtattcgaaattgaaaaggagaagcacagcctcaaaccggaagtgattgccgaagcttcgctctccttggagtatccgattgttgtgaagactggtaagaaccgtctgaccattggtactaaagaagagttcctgtaccgcagattggcgattcaagcggcgcgtcgtcgtacccaggttggtgcaacctacagccgttctggtaagggtaagaagcgcaaattaaaagccgtcgataaataccataaaacggaatcaaactatgtggcgcatcgtattcacgtttacagccgtaagttaatcgatttctgcattaaacaccaagcgggcaccctgatccttatgaatcaggaggacaaagttggcatcgccaaagaggaggagttcgtgctgcgtaattggtcctattacgaactgatgaccaaaatcaagtacaaagctgagaaggctggcatcgaattgattatcggctaaggctccggaagaaggagatatacatatgttatattcagattttgaattgctaaaaattggcgacactagtgcgttggaccatatccatgcaaaatactttcgttccatcctgtggatcggccgtcagtggctgaacgatgattttttgatcgagtctctggttcaggatacgtttctaaagctgtgggttaatagagataagctggaaagcccggaacacattttttacttcttgcgtttcgtgatgaagcgcgagtgcattagctattaccgtaaaccaaaatacaaatttcataaaaaagtgaacagcttggaggattacgacaactatcaggactatatggtgggttatgatccggttaacgactctgagaacctggacgaacaagaaagcacccagaaatccttcgaccacattaaatcgattcttccgctgctgaatgcggataagcgccatctgatcgagttatgtctgaagtacggtttccaatataaggcgatcagcaaagttatgggtaaaggtattcacgaaaccagccgtgaaatcaaagaagccatcgaggacatcaagaccattgtccacaagggcaacgagctcggcagcaatgacaccatgaccaatgaaatcaagtttagcggtgaattatccgaggaacaggctaaggtgctgaagatgcgctgcgatttgaagtacagcttctctgagattgccaaggagctggaactgtccgagaaagaggtacaccaagagttcatgaaggcatataaactgatgaaagcgaaccaccagttgcaactgcaaagcgcgtaagtccttaagccaaggagacgtaccatgctaatggctgataagaacacaaataaatcgaaggtctatttcagcgataaatacgtgtgcaagttcatcagcgaagagtggctgaccagcaaggacacctccgcgcgtaaatacggtaaaatctacggcgtgaactaccatgttattgaaaagatccagcaagagaatggttataacattccgctgagcaccctgtctacgatttgttttaaccacggcatcaaattgtccgacttctttaaattggttgagaagaagtacggtgaatttctgaatgatagctatgagtataaataataagaattcctgctgccaccgctgagcaataactagcataaccccttggggcctctaaacgggtcttgaggggttttttgctgaaacctcaggcatttgagaagcacacggtcacactgcttccggtagtcaataaaccggtaaaccagcaatagacataagcggctatttaacgaccctgccctgaaccgacgaccgggtcatcgtggccggatcttgcggcccctcggcttgaacgaattgttagacattatttgccgactaccttggtgatctcgcctttcacgtagtggacaaattcttccaactgatctgcgcgcgaggccaagcgatcttcttcttgtccaagataagcctgtctagcttcaagtatgacgggctgatactgggccggcaggcgctccattgcccagtcggcagcgacatccttcggcgcgattttgccggttactgcgctgtaccaaatgcgggacaacgtaagcactacatttcgctcatcgccagcccagtcgggcggcgagttccatagcgttaaggtttcatttagcgcctcaaatagatcctgttcaggaaccggatcaaagagttcctccgccgctggacctaccaaggcaacgctatgttctcttgcttttgtcagcaagatagccagatcaatgtcgatcgtggctggctcgaagatacctgcaagaatgtcattgcgctgccattctccaaattgcagttcgcgcttagctggataacgccacggaatgatgtcgtcgtgcacaacaatggtgacttctacagcgcggagaatctcgctctctccaggggaagccgaagtttccaaaaggtcgttgatcaaagctcgccgcgttgtttcatcaagccttacggtcaccgtaaccagcaaatcaatatcactgtgtggcttcaggccgccatccactgcggagccgtacaaatgtacggccagcaacgtcggttcgagatggcgctcgatgacgccaactacctctgatagttgagtcgatacttcggcgatcaccgcttccctcatactcttcctttttcaatattattgaagcatttatcagggttattgtctcatgagcggatacatatttgaatgtatttagaaaaataaacaaatagctagctcactcggtcgctacgctccgggcgtgagactgcggcgggcgctgcggacacatacaaagttacccacagattccgtggataagcaggggactaacatgtgaggcaaaacagcagggccgcgccggtggcgtttttccataggctccgccctcctgccagagttcacataaacagacgcttttccggtgcatctgtgggagccgtgaggctcaaccatgaatctgacagtacgggcgaaacccgacaggacttaaagatccccaccgtttccggcgggtcgctccctcttgcgctctcctgttccgaccctgccgtttaccggatacctgttccgcctttctcccttacgggaagtgtggcgctttctcatagctcacacactggtatctcggctcggtgtaggtcgttcgctccaagctgggctgtaagcaagaactccccgttcagcccgactgctgcgccttatccggtaactgttcacttgagtccaacccggaaaagcacggtaaaacgccactggcagcagccattggtaactgggagttcgcagaggatttgtttagctaaacacgcggttgctcttgaagtgtgcgccaaagtccggctacactggaaggacagatttggttgctgtgctctgcgaaagccagttaccacggttaagcagttccccaactgacttaaccttcgatcaaaccacctccccaggtggttttttcgtttacagggcaaaagattacgcgcagaaaaaaaggatctcaagaagatcctttgatcttttctactgaaccgctctagatttcagtgcaatttatctcttcaaatgtagcacctgaagtcagccccatacgatataagttgtaattctcatgttagtcatgccccgcgcccaccggaaggagctgactgggttgaaggctctcaagggcatcggtcgagatcccggtgcctaatgagtgagctaacttacattaattgcgttgcgctcactgcccgctttccagtcgggaaacctgtcgtgccagctgcattaatgaatcggccaacgcgcggggagaggcggtttgcgtattgggcgccagggtggtttttcttttcaccagtgagacgggcaacagctgattgcccttcaccgcctggccctgagagagttgcagcaagcggtccacgctggtttgccccagcaggcgaaaatcctgtttgatggtggttaacggcgggatataacatgagctgtcttcggtatcgtcgtatcccactaccgagatgtccgcaccaacgcgcagcccggactcggtaatggcgcgcattgcgcccagcgccatctgatcgttggcaaccagcatcgcagtgggaacgatgccctcattcagcatttgcatggtttgttgaaaaccggacatggcactccagtcgccttcccgttccgctatcggctgaatttgattgcgagtgagatatttatgccagccagccagacgcagacgcgccgagacagaacttaatgggcccgctaacagcgcgatttgctggtgacccaatgcgaccagatgctccacgcccagtcgcgtaccgtcttcatgggagaaaataatactgttgatgggtgtctggtcagagacatcaagaaataacgccggaacattagtgcaggcagcttccacagcaatggcatcctggtcatccagcggatagttaatgatcagcccactgacgcgttgcgcgagaagattgtgcaccgccgctttacaggcttcgacgccgcttcgttctaccatcgacaccaccacgctggcacccagttgatcggcgcgagatttaatcgccgcgacaatttgcgacggcgcgtgcagggccagactggaggtggcaacgccaatcagcaacgactgtttgcccgccagttgttgtgccacgcggttgggaatgtaattcagctccgccatcgccgcttccactttttcccgcgttttcgcagaaacgtggctggcctggttcaccacgcgggaaacggtctgataagagacaccggcatactctgcgacatcgtataacgttactggtttcac

SEQ ID NO: 5962 - DNA, 6435 bp, synthetic construct
  source 1..6435: mol_type = other DNA
attcaccaccctgaattgactctcttccgggcgctatcatgccataccgcgaaaggttttgcgccattcgatggtgtccgggattgacagctagctcagtcctaggtataatgctagcgtggagatatacctcgagcaattagattttgagggtgcttgtacacccatagggtgaggttaagaattacactcactaagtgtgaacaacacatacaactaccagcgtgatgacgttcgatagcaatcaataagcctaaatacgggcacctaaatacaatatgggacaaacaccgataaagtttttttgaacgattgaaaatggatacttttaatgaagtgtccagaaatcgtcaaatattagatagaacccttgggatattgcttctccttataggtatcgcaattgggattttccttattcctgattttttaccactacttaaaaggactccttatttattgctcgaacccgatgcaggtgtaagacatgagcttggatacgcttggtttatgcaatcaattggttggatcattgcttttttcgcatttaggagcagtagggcatttttaagggatagcaagaaaccaactagtaccagtaattaaatcaaaggtgaaagaggtatatagttgcctaaacaccatatacaactcactgaaaaaccgctccgaaacgcaatattctgtgatgacagccattcatccggtaggctaaagtatgtaaaaagaagctaatgtcatcttcccttttctcctcgaggcggccgcaataatagactagcataaccccttggggcctctaaacgggtcttgaggggttttttgctgaacgtacgttttacggctagctcagtcctaggtactatgctagcgtggagatatacggtaccaaggaggtaaataatgggagactacaaagaccatgacggtgattataaagatcatgacatcgattacaaggatgacgatgacaagggaggatccggcagcatgggaaaatcaacactaaagcacactaggaagattcagatcttgatcgacctgccgacgaaagacgagaagaaagaggttatggatatgatgtatcagtggcgtgatcgttgcttccgcgcagcgaacattatcgtgacccatctgtacgttcaggagatgatcaaggacttcttttatctgagcgaaggtattaagtacaaactcgcggatgagaaaaaagacgaaaagggcatcctgcaacgtagccgtatgaacaccacctatcgcgtggtgagcgaccgttttaagggcgagatgccgacgaatatcctttccaccctgaaccacggcctgatcagcagctttaacaaaaaccgcgtccagtattggaaaggcgaacgtagcctgccaaatttcaaaaaggacatggcattcccgtttggtctgcaaggtatctctcgtctggtgtatgatgaagaaaaaaaggcgttctgctttagattgtaccgcgttccgtttaaaacgtacttgggtaaggacttcaccgataaacgcatgctgctggagcgcctagtcaaaggagacgttaagctgtgtgcgtcgaacattcaactgaatggtggtaagatcttttggctggctgtattcgaaattgaaaaggagaagcacagcctcaaaccggaagtgattgccgaagcttcgctctccttggagtatccgattgttgtgaagactggtaagaaccgtctgaccattggtactaaagaagagttcctgtaccgcagattggcgattcaagcggcgcgtcgtcgtacccaggttggtgcaacctacagccgttctggtaagggtaagaagcgcaaattaaaagccgtcgataaataccataaaacggaatcaaactatgtggcgcatcgtattcacgtttacagccgtaagttaatcgatttctgcattaaacaccaagcgggcaccctgatccttatgaatcaggaggacaaagttggcatcgccaaagaggaggagttcgtgctgcgtaattggtcctattacgaactgatgaccaaaatcaagtacaaagctgagaaggctggcatcgaattgattatcggctaaggctccggaagaaggagatatacatatgttatattcagattttgaattgctaaaaattggcgacactagtgcgttggaccatatccatgcaaaatactttcgttccatcctgtggatcggccgtcagtggctgaacgatgattttttgatcgagtctctggttcaggatacgtttctaaagctgtgggttaatagagataagctggaaagcccggaacacattttttacttcttgcgtttcgtgatgaagcgcgagtgcattagctattaccgtaaaccaaaatacaaatttcataaaaaagtgaacagcttggaggattacgacaactatcaggactatatggtgggttatgatccggttaacgactctgagaacctggacgaacaagaaagcacccagaaatccttcgaccacattaaatcgattcttccgctgctgaatgcggataagcgccatctgatcgagttatgtctgaagtacggtttccaatataaggcgatcagcaaagttatgggtaaaggtattcacgaaaccagccgtgaaatcaaagaagccatcgaggacatcaagaccattgtccacaagggcaacgagctcggcagcaatgacaccatgaccaatgaaatcaagtttagcggtgaattatccgaggaacaggctaaggtgctgaagatgcgctgcgatttgaagtacagcttctctgagattgccaaggagctggaactgtccgagaaagaggtacaccaagagttcatgaaggcatataaactgatgaaagcgaaccaccagttgcaactgcaaagcgcgtaagtccttaagccaaggagacgtaccatgctaatggctgataagaacacaaataaatcgaaggtctatttcagcgataaatacgtgtgcaagttcatcagcgaagagtggctgaccagcaaggacacctccgcgcgtaaatacggtaaaatctacggcgtgaactaccatgttattgaaaagatccagcaagagaatggttataacattccgctgagcaccctgtctacgatttgttttaaccacggcatcaaattgtccgacttctttaaattggttgagaagaagtacggtgaatttctgaatgatagctatgagtataaataataagaattcctgctgccaccgctgagcaataactagcataaccccttggggcctctaaacgggtcttgaggggttttttgctgaaacctcaggcatttgagaagcacacggtcacactgcttccggtagtcaataaaccggtaaaccagcaatagacataagcggctatttaacgaccctgccctgaaccgacgaccgggtcatcgtggccggatcttgcggcccctcggcttgaacgaattgttagacattatttgccgactaccttggtgatctcgcctttcacgtagtggacaaattcttccaactgatctgcgcgcgaggccaagcgatcttcttcttgtccaagataagcctgtctagcttcaagtatgacgggctgatactgggccggcaggcgctccattgcccagtcggcagcgacatccttcggcgcgattttgccggttactgcgctgtaccaaatgcgggacaacgtaagcactacatttcgctcatcgccagcccagtcgggcggcgagttccatagcgttaaggtttcatttagcgcctcaaatagatcctgttcaggaaccggatcaaagagttcctccgccgctggacctaccaaggcaacgctatgttctcttgcttttgtcagcaagatagccagatcaatgtcgatcgtggctggctcgaagatacctgcaagaatgtcattgcgctgccattctccaaattgcagttcgcgcttagctggataacgccacggaatgatgtcgtcgtgcacaacaatggtgacttctacagcgcggagaatctcgctctctccaggggaagccgaagtttccaaaaggtcgttgatcaaagctcgccgcgttgtttcatcaagccttacggtcaccgtaaccagcaaatcaatatcactgtgtggcttcaggccgccatccactgcggagccgtacaaatgtacggccagcaacgtcggttcgagatggcgctcgatgacgccaactacctctgatagttgagtcgatacttcggcgatcaccgcttccctcatactcttcctttttcaatattattgaagcatttatcagggttattgtctcatgagcggatacatatttgaatgtatttagaaaaataaacaaatagctagctcactcggtcgctacgctccgggcgtgagactgcggcgggcgctgcggacacatacaaagttacccacagattccgtggataagcaggggactaacatgtgaggcaaaacagcagggccgcgccggtggcgtttttccataggctccgccctcctgccagagttcacataaacagacgcttttccggtgcatctgtgggagccgtgaggctcaaccatgaatctgacagtacgggcgaaacccgacaggacttaaagatccccaccgtttccggcgggtcgctccctcttgcgctctcctgttccgaccctgccgtttaccggatacctgttccgcctttctcccttacgggaagtgtggcgctttctcatagctcacacactggtatctcggctcggtgtaggtcgttcgctccaagctgggctgtaagcaagaactccccgttcagcccgactgctgcgccttatccggtaactgttcacttgagtccaacccggaaaagcacggtaaaacgccactggcagcagccattggtaactgggagttcgcagaggatttgtttagctaaacacgcggttgctcttgaagtgtgcgccaaagtccggctacactggaaggacagatttggttgctgtgctctgcgaaagccagttaccacggttaagcagttccccaactgacttaaccttcgatcaaaccacctccccaggtggttttttcgtttacagggcaaaagattacgcgcagaaaaaaaggatctcaagaagatcctttgatcttttctactgaaccgctctagatttcagtgcaatttatctcttcaaatgtagcacctgaagtcagccccatacgatataagttgtaattctcatgttagtcatgccccgcgcccaccggaaggagctgactgggttgaaggctctcaagggcatcggtcgagatcccggtgcctaatgagtgagctaacttacattaattgcgttgcgctcactgcccgctttccagtcgggaaacctgtcgtgccagctgcattaatgaatcggccaacgcgcggggagaggcggtttgcgtattgggcgccagggtggtttttcttttcaccagtgagacgggcaacagctgattgcccttcaccgcctggccctgagagagttgcagcaagcggtccacgctggtttgccccagcaggcgaaaatcctgtttgatggtggttaacggcgggatataacatgagctgtcttcggtatcgtcgtatcccactaccgagatgtccgcaccaacgcgcagcccggactcggtaatggcgcgcattgcgcccagcgccatctgatcgttggcaaccagcatcgcagtgggaacgatgccctcattcagcatttgcatggtttgttgaaaaccggacatggcactccagtcgccttcccgttccgctatcggctgaatttgattgcgagtgagatatttatgccagccagccagacgcagacgcgccgagacagaacttaatgggcccgctaacagcgcgatttgctggtgacccaatgcgaccagatgctccacgcccagtcgcgtaccgtcttcatgggagaaaataatactgttgatgggtgtctggtcagagacatcaagaaataacgccggaacattagtgcaggcagcttccacagcaatggcatcctggtcatccagcggatagttaatgatcagcccactgacgcgttgcgcgagaagattgtgcaccgccgctttacaggcttcgacgccgcttcgttctaccatcgacaccaccacgctggcacccagttgatcggcgcgagatttaatcgccgcgacaatttgcgacggcgcgtgcagggccagactggaggtggcaacgccaatcagcaacgactgtttgcccgccagttgttgtgccacgcggttgggaatgtaattcagctccgccatcgccgcttccactttttcccgcgttttcgcagaaacgtggctggcctggttcaccacgcgggaaacggtctgataagagacaccggcatactctgcgacatcgtataacgttactggtttcac

SEQ ID NO: 5963 - DNA, 5688 bp, synthetic construct
  source 1..5688: mol_type = other DNA
attcaccaccctgaattgactctcttccgggcgctatcatgccataccgcgaaaggttttgcgccattcgatggtgtccgggacgtacgttttacggctagctcagtcctaggtactatgctagcgtggagatatacggtaccaaggaggtaaataatgggagactacaaagaccatgacggtgattataaagatcatgacatcgattacaaggatgacgatgacaagggaggatccggcagcatgggaaaatcaacactaaagcacactaggaagattcagatcttgatcgacctgccgacgaaagacgagaagaaagaggttatggatatgatgtatcagtggcgtgatcgttgcttccgcgcagcgaacattatcgtgacccatctgtacgttcaggagatgatcaaggacttcttttatctgagcgaaggtattaagtacaaactcgcggatgagaaaaaagacgaaaagggcatcctgcaacgtagccgtatgaacaccacctatcgcgtggtgagcgaccgttttaagggcgagatgccgacgaatatcctttccaccctgaaccacggcctgatcagcagctttaacaaaaaccgcgtccagtattggaaaggcgaacgtagcctgccaaatttcaaaaaggacatggcattcccgtttggtctgcaaggtatctctcgtctggtgtatgatgaagaaaaaaaggcgttctgctttagattgtaccgcgttccgtttaaaacgtacttgggtaaggacttcaccgataaacgcatgctgctggagcgcctagtcaaaggagacgttaagctgtgtgcgtcgaacattcaactgaatggtggtaagatcttttggctggctgtattcgaaattgaaaaggagaagcacagcctcaaaccggaagtgattgccgaagcttcgctctccttggagtatccgattgttgtgaagactggtaagaaccgtctgaccattggtactaaagaagagttcctgtaccgcagattggcgattcaagcggcgcgtcgtcgtacccaggttggtgcaacctacagccgttctggtaagggtaagaagcgcaaattaaaagccgtcgataaataccataaaacggaatcaaactatgtggcgcatcgtattcacgtttacagccgtaagttaatcgatttctgcattaaacaccaagcgggcaccctgatccttatgaatcaggaggacaaagttggcatcgccaaagaggaggagttcgtgctgcgtaattggtcctattacgaactgatgaccaaaatcaagtacaaagctgagaaggctggcatcgaattgattatcggctaaggctccggaagaaggagatatacatatgttatattcagattttgaattgctaaaaattggcgacactagtgcgttggaccatatccatgcaaaatactttcgttccatcctgtggatcggccgtcagtggctgaacgatgattttttgatcgagtctctggttcaggatacgtttctaaagctgtgggttaatagagataagctggaaagcccggaacacattttttacttcttgcgtttcgtgatgaagcgcgagtgcattagctattaccgtaaaccaaaatacaaatttcataaaaaagtgaacagcttggaggattacgacaactatcaggactatatggtgggttatgatccggttaacgactctgagaacctggacgaacaagaaagcacccagaaatccttcgaccacattaaatcgattcttccgctgctgaatgcggataagcgccatctgatcgagttatgtctgaagtacggtttccaatataaggcgatcagcaaagttatgggtaaaggtattcacgaaaccagccgtgaaatcaaagaagccatcgaggacatcaagaccattgtccacaagggcaacgagctcggcagcaatgacaccatgaccaatgaaatcaagtttagcggtgaattatccgaggaacaggctaaggtgctgaagatgcgctgcgatttgaagtacagcttctctgagattgccaaggagctggaactgtccgagaaagaggtacaccaagagttcatgaaggcatataaactgatgaaagcgaaccaccagttgcaactgcaaagcgcgtaagtccttaagccaaggagacgtaccatgctaatggctgataagaacacaaataaatcgaaggtctatttcagcgataaatacgtgtgcaagttcatcagcgaagagtggctgaccagcaaggacacctccgcgcgtaaatacggtaaaatctacggcgtgaactaccatgttattgaaaagatccagcaagagaatggttataacattccgctgagcaccctgtctacgatttgttttaaccacggcatcaaattgtccgacttctttaaattggttgagaagaagtacggtgaatttctgaatgatagctatgagtataaataataagaattcctgctgccaccgctgagcaataactagcataaccccttggggcctctaaacgggtcttgaggggttttttgctgaaacctcaggcatttgagaagcacacggtcacactgcttccggtagtcaataaaccggtaaaccagcaatagacataagcggctatttaacgaccctgccctgaaccgacgaccgggtcatcgtggccggatcttgcggcccctcggcttgaacgaattgttagacattatttgccgactaccttggtgatctcgcctttcacgtagtggacaaattcttccaactgatctgcgcgcgaggccaagcgatcttcttcttgtccaagataagcctgtctagcttcaagtatgacgggctgatactgggccggcaggcgctccattgcccagtcggcagcgacatccttcggcgcgattttgccggttactgcgctgtaccaaatgcgggacaacgtaagcactacatttcgctcatcgccagcccagtcgggcggcgagttccatagcgttaaggtttcatttagcgcctcaaatagatcctgttcaggaaccggatcaaagagttcctccgccgctggacctaccaaggcaacgctatgttctcttgcttttgtcagcaagatagccagatcaatgtcgatcgtggctggctcgaagatacctgcaagaatgtcattgcgctgccattctccaaattgcagttcgcgcttagctggataacgccacggaatgatgtcgtcgtgcacaacaatggtgacttctacagcgcggagaatctcgctctctccaggggaagccgaagtttccaaaaggtcgttgatcaaagctcgccgcgttgtttcatcaagccttacggtcaccgtaaccagcaaatcaatatcactgtgtggcttcaggccgccatccactgcggagccgtacaaatgtacggccagcaacgtcggttcgagatggcgctcgatgacgccaactacctctgatagttgagtcgatacttcggcgatcaccgcttccctcatactcttcctttttcaatattattgaagcatttatcagggttattgtctcatgagcggatacatatttgaatgtatttagaaaaataaacaaatagctagctcactcggtcgctacgctccgggcgtgagactgcggcgggcgctgcggacacatacaaagttacccacagattccgtggataagcaggggactaacatgtgaggcaaaacagcagggccgcgccggtggcgtttttccataggctccgccctcctgccagagttcacataaacagacgcttttccggtgcatctgtgggagccgtgaggctcaaccatgaatctgacagtacgggcgaaacccgacaggacttaaagatccccaccgtttccggcgggtcgctccctcttgcgctctcctgttccgaccctgccgtttaccggatacctgttccgcctttctcccttacgggaagtgtggcgctttctcatagctcacacactggtatctcggctcggtgtaggtcgttcgctccaagctgggctgtaagcaagaactccccgttcagcccgactgctgcgccttatccggtaactgttcacttgagtccaacccggaaaagcacggtaaaacgccactggcagcagccattggtaactgggagttcgcagaggatttgtttagctaaacacgcggttgctcttgaagtgtgcgccaaagtccggctacactggaaggacagatttggttgctgtgctctgcgaaagccagttaccacggttaagcagttccccaactgacttaaccttcgatcaaaccacctccccaggtggttttttcgtttacagggcaaaagattacgcgcagaaaaaaaggatctcaagaagatcctttgatcttttctactgaaccgctctagatttcagtgcaatttatctcttcaaatgtagcacctgaagtcagccccatacgatataagttgtaattctcatgttagtcatgccccgcgcccaccggaaggagctgactgggttgaaggctctcaagggcatcggtcgagatcccggtgcctaatgagtgagctaacttacattaattgcgttgcgctcactgcccgctttccagtcgggaaacctgtcgtgccagctgcattaatgaatcggccaacgcgcggggagaggcggtttgcgtattgggcgccagggtggtttttcttttcaccagtgagacgggcaacagctgattgcccttcaccgcctggccctgagagagttgcagcaagcggtccacgctggtttgccccagcaggcgaaaatcctgtttgatggtggttaacggcgggatataacatgagctgtcttcggtatcgtcgtatcccactaccgagatgtccgcaccaacgcgcagcccggactcggtaatggcgcgcattgcgcccagcgccatctgatcgttggcaaccagcatcgcagtgggaacgatgccctcattcagcatttgcatggtttgttgaaaaccggacatggcactccagtcgccttcccgttccgctatcggctgaatttgattgcgagtgagatatttatgccagccagccagacgcagacgcgccgagacagaacttaatgggcccgctaacagcgcgatttgctggtgacccaatgcgaccagatgctccacgcccagtcgcgtaccgtcttcatgggagaaaataatactgttgatgggtgtctggtcagagacatcaagaaataacgccggaacattagtgcaggcagcttccacagcaatggcatcctggtcatccagcggatagttaatgatcagcccactgacgcgttgcgcgagaagattgtgcaccgccgctttacaggcttcgacgccgcttcgttctaccatcgacaccaccacgctggcacccagttgatcggcgcgagatttaatcgccgcgacaatttgcgacggcgcgtgcagggccagactggaggtggcaacgccaatcagcaacgactgtttgcccgccagttgttgtgccacgcggttgggaatgtaattcagctccgccatcgccgcttccactttttcccgcgttttcgcagaaacgtggctggcctggttcaccacgcgggaaacggtctgataagagacaccggcatactctgcgacatcgtataacgttactggtttcac

SEQ ID NO: 5964 - DNA, 5719 bp, synthetic construct
  source 1..5719: mol_type = other DNA
attcaccaccctgaattgactctcttccgggcgctatcatgccataccgcgaaaggttttgcgccattcgatggtgtccgggattgacagctagctcagtcctaggtataatgctagcgtggagatatacctcgagcaattagattttgagggtgcttgtacacccatagggtgaggttaagaattacactcactaagtgtgaacaacacatacaactaccagcgtgatgacgttcgatagcaatcaataagcctaaatacgggcacctaaatacaatatgggacaaacaccgataaagtttttttgaacgattgaaaatggatacttttaatgaagtgtccagaaatcgtcaaatattagatagaacccttgggatattgcttctccttataggtatcgcaattgggattttccttattcctgattttttaccactacttaaaaggactccttatttattgctcgaacccgatgcaggtgtaagacatgagcttggatacgcttggtttatgcaatcaattggttggatcattgcttttttcgcatttaggagcagtagggcatttttaagggatagcaagaaaccaactagtaccagtaattaaatcaaaggtgaaagaggtatatagttgcctaaacaccatatacaactcactgaaaaaccgctccgaaacgcaatattctgtgatgacagccattcatccggtaggctaaagtatgtaaaaagaagctaatgtcatcttcccttttctcctcgaggcggccgcaaatgaaaaaattacaagaagtttttttgagagcgttcgctctcatttaggggtttttattatatttatccctgaaataacatatttgcgaaacttgttaagttaataatattagaagcattcgctttgattctcgcatcaaaaactggtaatttttaacgacgagatgataagtgcaaatgctcacggcccgggcgtgagcttacttattgtcgtgcggtataccagtaccttgatgctataggttaagttttcacgccctctttatcttatttaaaaagggctttctcaacttttcaaagctatcttctctttatccttttttaagaaatcgcatcagctttaaaagcataatcaattttaaccatggtgcattgaccatcttaaacgaggcctgttgcggccgcaataatagactagcataaccccttggggcctctaaacgggtcttgaggggttttttgctgaacgtacgttttacggctagctcagtcctaggtactatgctagcgtggagatatacggtaccaaggaggtaaataatgggagactacaaagaccatgacggtgattataaagatcatgacatcgattacaaggatgacgatgacaagggaggatccggcagcatgttatattcagattttgaattgctaaaaattggcgacactagtgcgttggaccatatccatgcaaaatactttcgttccatcctgtggatcggccgtcagtggctgaacgatgattttttgatcgagtctctggttcaggatacgtttctaaagctgtgggttaatagagataagctggaaagcccggaacacattttttacttcttgcgtttcgtgatgaagcgcgagtgcattagctattaccgtaaaccaaaatacaaatttcataaaaaagtgaacagcttggaggattacgacaactatcaggactatatggtgggttatgatccggttaacgactctgagaacctggacgaacaagaaagcacccagaaatccttcgaccacattaaatcgattcttccgctgctgaatgcggataagcgccatctgatcgagttatgtctgaagtacggtttccaatataaggcgatcagcaaagttatgggtaaaggtattcacgaaaccagccgtgaaatcaaagaagccatcgaggacatcaagaccattgtccacaagggcaacgagctcggcagcaatgacaccatgaccaatgaaatcaagtttagcggtgaattatccgaggaacaggctaaggtgctgaagatgcgctgcgatttgaagtacagcttctctgagattgccaaggagctggaactgtccgagaaagaggtacaccaagagttcatgaaggcatataaactgatgaaagcgaaccaccagttgcaactgcaaagcgcgtaagtccttaagccaaggagacgtaccatgctaatggctgataagaacacaaataaatcgaaggtctatttcagcgataaatacgtgtgcaagttcatcagcgaagagtggctgaccagcaaggacacctccgcgcgtaaatacggtaaaatctacggcgtgaactaccatgttattgaaaagatccagcaagagaatggttataacattccgctgagcaccctgtctacgatttgttttaaccacggcatcaaattgtccgacttctttaaattggttgagaagaagtacggtgaatttctgaatgatagctatgagtataaataataagaattcctgctgccaccgctgagcaataactagcataaccccttggggcctctaaacgggtcttgaggggttttttgctgaaacctcaggcatttgagaagcacacggtcacactgcttccggtagtcaataaaccggtaaaccagcaatagacataagcggctatttaacgaccctgccctgaaccgacgaccgggtcatcgtggccggatcttgcggcccctcggcttgaacgaattgttagacattatttgccgactaccttggtgatctcgcctttcacgtagtggacaaattcttccaactgatctgcgcgcgaggccaagcgatcttcttcttgtccaagataagcctgtctagcttcaagtatgacgggctgatactgggccggcaggcgctccattgcccagtcggcagcgacatccttcggcgcgattttgccggttactgcgctgtaccaaatgcgggacaacgtaagcactacatttcgctcatcgccagcccagtcgggcggcgagttccatagcgttaaggtttcatttagcgcctcaaatagatcctgttcaggaaccggatcaaagagttcctccgccgctggacctaccaaggcaacgctatgttctcttgcttttgtcagcaagatagccagatcaatgtcgatcgtggctggctcgaagatacctgcaagaatgtcattgcgctgccattctccaaattgcagttcgcgcttagctggataacgccacggaatgatgtcgtcgtgcacaacaatggtgacttctacagcgcggagaatctcgctctctccaggggaagccgaagtttccaaaaggtcgttgatcaaagctcgccgcgttgtttcatcaagccttacggtcaccgtaaccagcaaatcaatatcactgtgtggcttcaggccgccatccactgcggagccgtacaaatgtacggccagcaacgtcggttcgagatggcgctcgatgacgccaactacctctgatagttgagtcgatacttcggcgatcaccgcttccctcatactcttcctttttcaatattattgaagcatttatcagggttattgtctcatgagcggatacatatttgaatgtatttagaaaaataaacaaatagctagctcactcggtcgctacgctccgggcgtgagactgcggcgggcgctgcggacacatacaaagttacccacagattccgtggataagcaggggactaacatgtgaggcaaaacagcagggccgcgccggtggcgtttttccataggctccgccctcctgccagagttcacataaacagacgcttttccggtgcatctgtgggagccgtgaggctcaaccatgaatctgacagtacgggcgaaacccgacaggacttaaagatccccaccgtttccggcgggtcgctccctcttgcgctctcctgttccgaccctgccgtttaccggatacctgttccgcctttctcccttacgggaagtgtggcgctttctcatagctcacacactggtatctcggctcggtgtaggtcgttcgctccaagctgggctgtaagcaagaactccccgttcagcccgactgctgcgccttatccggtaactgttcacttgagtccaacccggaaaagcacggtaaaacgccactggcagcagccattggtaactgggagttcgcagaggatttgtttagctaaacacgcggttgctcttgaagtgtgcgccaaagtccggctacactggaaggacagatttggttgctgtgctctgcgaaagccagttaccacggttaagcagttccccaactgacttaaccttcgatcaaaccacctccccaggtggttttttcgtttacagggcaaaagattacgcgcagaaaaaaaggatctcaagaagatcctttgatcttttctactgaaccgctctagatttcagtgcaatttatctcttcaaatgtagcacctgaagtcagccccatacgatataagttgtaattctcatgttagtcatgccccgcgcccaccggaaggagctgactgggttgaaggctctcaagggcatcggtcgagatcccggtgcctaatgagtgagctaacttacattaattgcgttgcgctcactgcccgctttccagtcgggaaacctgtcgtgccagctgcattaatgaatcggccaacgcgcggggagaggcggtttgcgtattgggcgccagggtggtttttcttttcaccagtgagacgggcaacagctgattgcccttcaccgcctggccctgagagagttgcagcaagcggtccacgctggtttgccccagcaggcgaaaatcctgtttgatggtggttaacggcgggatataacatgagctgtcttcggtatcgtcgtatcccactaccgagatgtccgcaccaacgcgcagcccggactcggtaatggcgcgcattgcgcccagcgccatctgatcgttggcaaccagcatcgcagtgggaacgatgccctcattcagcatttgcatggtttgttgaaaaccggacatggcactccagtcgccttcccgttccgctatcggctgaatttgattgcgagtgagatatttatgccagccagccagacgcagacgcgccgagacagaacttaatgggcccgctaacagcgcgatttgctggtgacccaatgcgaccagatgctccacgcccagtcgcgtaccgtcttcatgggagaaaataatactgttgatgggtgtctggtcagagacatcaagaaataacgccggaacattagtgcaggcagcttccacagcaatggcatcctggtcatccagcggatagttaatgatcagcccactgacgcgttgcgcgagaagattgtgcaccgccgctttacaggcttcgacgccgcttcgttctaccatcgacaccaccacgctggcacccagttgatcggcgcgagatttaatcgccgcgacaatttgcgacggcgcgtgcagggccagactggaggtggcaacgccaatcagcaacgactgtttgcccgccagttgttgtgccacgcggttgggaatgtaattcagctccgccatcgccgcttccactttttcccgcgttttcgcagaaacgtggctggcctggttcaccacgcgggaaacggtctgataagagacaccggcatactctgcgacatcgtataacgttactggtttcac

SEQ ID NO: 5965 - DNA, 6031 bp, synthetic construct
  source 1..6031: mol_type = other DNA
attcaccaccctgaattgactctcttccgggcgctatcatgccataccgcgaaaggttttgcgccattcgatggtgtccgggattgacagctagctcagtcctaggtataatgctagcgtggagatatacctcgagcaattagattttgagggtgcttgtacacccatagggtgaggttaagaattacactcactaagtgtgaacaacacatacaactaccagcgtgatgacgttcgatagcaatcaataagcctaaatacgggcacctaaatacaatatgggacaaacaccgataaagtttttttgaacgattgaaaatggatacttttaatgaagtgtccagaaatcgtcaaatattagatagaacccttgggatattgcttctccttataggtatcgcaattgggattttccttattcctgattttttaccactacttaaaaggactccttatttattgctcgaacccgatgcaggtgtaagacatgagcttggatacgcttggtttatgcaatcaattggttggatcattgcttttttcgcatttaggagcagtagggcatttttaagggatagcaagaaaccaactagtaccagtaattaaatcaaaggtgaaagaggtatatagttgcctaaacaccatatacaactcactgaaaaaccgctccgaaacgcaatattctgtgatgacagccattcatccggtaggctaaagtatgtaaaaagaagctaatgtcatcttcccttttctcctcgaggcggccgcaaatgaaaaaattacaagaagtttttttgagagcgttcgctctcatttaggggtttttattatatttatccctgaaataacatatttgcgaaacttgttaagttaataatattagaagcattcgctttgattctcgcatcaaaaactggtaatttttaacgacgagatgataagtgcaaatgctcacggcccgggcgtgagcttacttattgtcgtgcggtataccagtaccttgatgctataggttaagttttcacgccctctttatcttatttaaaaagggctttctcaacttttcaaagctatcttctctttatccttttttaagaaatcgcatcagctttaaaagcataatcaattttaaccatggtgcattgaccatcttaaacgaggcctgttgcggccgcaataatagactagcataaccccttggggcctctaaacgggtcttgaggggttttttgctgaacgtacgttttacggctagctcagtcctaggtactatgctagcgtggagatatacggtaccaaggaggtaaataatgggagactacaaagaccatgacggtgattataaagatcatgacatcgattacaaggatgacgatgacaagggaggatccggcagcatgggaaaatcaacactaaagcacactaggaagattcagatcttgatcgacctgccgacgaaagacgagaagaaagaggttatggatatgatgtatcagtggcgtgatcgttgcttccgcgcagcgaacattatcgtgacccatctgtacgttcaggagatgatcaaggacttcttttatctgagcgaaggtattaagtacaaactcgcggatgagaaaaaagacgaaaagggcatcctgcaacgtagccgtatgaacaccacctatcgcgtggtgagcgaccgttttaagggcgagatgccgacgaatatcctttccaccctgaaccacggcctgatcagcagctttaacaaaaaccgcgtccagtattggaaaggcgaacgtagcctgccaaatttcaaaaaggacatggcattcccgtttggtctgcaaggtatctctcgtctggtgtatgatgaagaaaaaaaggcgttctgctttagattgtaccgcgttccgtttaaaacgtacttgggtaaggacttcaccgataaacgcatgctgctggagcgcctagtcaaaggagacgttaagctgtgtgcgtcgaacattcaactgaatggtggtaagatcttttggctggctgtattcgaaattgaaaaggagaagcacagcctcaaaccggaagtgattgccgaagcttcgctctccttggagtatccgattgttgtgaagactggtaagaaccgtctgaccattggtactaaagaagagttcctgtaccgcagattggcgattcaagcggcgcgtcgtcgtacccaggttggtgcaacctacagccgttctggtaagggtaagaagcgcaaattaaaagccgtcgataaataccataaaacggaatcaaactatgtggcgcatcgtattcacgtttacagccgtaagttaatcgatttctgcattaaacaccaagcgggcaccctgatccttatgaatcaggaggacaaagttggcatcgccaaagaggaggagttcgtgctgcgtaattggtcctattacgaactgatgaccaaaatcaagtacaaagctgagaaggctggcatcgaattgattatcggctaagtccttaagccaaggagacgtaccatgctaatggctgataagaacacaaataaatcgaaggtctatttcagcgataaatacgtgtgcaagttcatcagcgaagagtggctgaccagcaaggacacctccgcgcgtaaatacggtaaaatctacggcgtgaactaccatgttattgaaaagatccagcaagagaatggttataacattccgctgagcaccctgtctacgatttgttttaaccacggcatcaaattgtccgacttctttaaattggttgagaagaagtacggtgaatttctgaatgatagctatgagtataaataataagaattcctgctgccaccgctgagcaataactagcataaccccttggggcctctaaacgggtcttgaggggttttttgctgaaacctcaggcatttgagaagcacacggtcacactgcttccggtagtcaataaaccggtaaaccagcaatagacataagcggctatttaacgaccctgccctgaaccgacgaccgggtcatcgtggccggatcttgcggcccctcggcttgaacgaattgttagacattatttgccgactaccttggtgatctcgcctttcacgtagtggacaaattcttccaactgatctgcgcgcgaggccaagcgatcttcttcttgtccaagataagcctgtctagcttcaagtatgacgggctgatactgggccggcaggcgctccattgcccagtcggcagcgacatccttcggcgcgattttgccggttactgcgctgtaccaaatgcgggacaacgtaagcactacatttcgctcatcgccagcccagtcgggcggcgagttccatagcgttaaggtttcatttagcgcctcaaatagatcctgttcaggaaccggatcaaagagttcctccgccgctggacctaccaaggcaacgctatgttctcttgcttttgtcagcaagatagccagatcaatgtcgatcgtggctggctcgaagatacctgcaagaatgtcattgcgctgccattctccaaattgcagttcgcgcttagctggataacgccacggaatgatgtcgtcgtgcacaacaatggtgacttctacagcgcggagaatctcgctctctccaggggaagccgaagtttccaaaaggtcgttgatcaaagctcgccgcgttgtttcatcaagccttacggtcaccgtaaccagcaaatcaatatcactgtgtggcttcaggccgccatccactgcggagccgtacaaatgtacggccagcaacgtcggttcgagatggcgctcgatgacgccaactacctctgatagttgagtcgatacttcggcgatcaccgcttccctcatactcttcctttttcaatattattgaagcatttatcagggttattgtctcatgagcggatacatatttgaatgtatttagaaaaataaacaaatagctagctcactcggtcgctacgctccgggcgtgagactgcggcgggcgctgcggacacatacaaagttacccacagattccgtggataagcaggggactaacatgtgaggcaaaacagcagggccgcgccggtggcgtttttccataggctccgccctcctgccagagttcacataaacagacgcttttccggtgcatctgtgggagccgtgaggctcaaccatgaatctgacagtacgggcgaaacccgacaggacttaaagatccccaccgtttccggcgggtcgctccctcttgcgctctcctgttccgaccctgccgtttaccggatacctgttccgcctttctcccttacgggaagtgtggcgctttctcatagctcacacactggtatctcggctcggtgtaggtcgttcgctccaagctgggctgtaagcaagaactccccgttcagcccgactgctgcgccttatccggtaactgttcacttgagtccaacccggaaaagcacggtaaaacgccactggcagcagccattggtaactgggagttcgcagaggatttgtttagctaaacacgcggttgctcttgaagtgtgcgccaaagtccggctacactggaaggacagatttggttgctgtgctctgcgaaagccagttaccacggttaagcagttccccaactgacttaaccttcgatcaaaccacctccccaggtggttttttcgtttacagggcaaaagattacgcgcagaaaaaaaggatctcaagaagatcctttgatcttttctactgaaccgctctagatttcagtgcaatttatctcttcaaatgtagcacctgaagtcagccccatacgatataagttgtaattctcatgttagtcatgccccgcgcccaccggaaggagctgactgggttgaaggctctcaagggcatcggtcgagatcccggtgcctaatgagtgagctaacttacattaattgcgttgcgctcactgcccgctttccagtcgggaaacctgtcgtgccagctgcattaatgaatcggccaacgcgcggggagaggcggtttgcgtattgggcgccagggtggtttttcttttcaccagtgagacgggcaacagctgattgcccttcaccgcctggccctgagagagttgcagcaagcggtccacgctggtttgccccagcaggcgaaaatcctgtttgatggtggttaacggcgggatataacatgagctgtcttcggtatcgtcgtatcccactaccgagatgtccgcaccaacgcgcagcccggactcggtaatggcgcgcattgcgcccagcgccatctgatcgttggcaaccagcatcgcagtgggaacgatgccctcattcagcatttgcatggtttgttgaaaaccggacatggcactccagtcgccttcccgttccgctatcggctgaatttgattgcgagtgagatatttatgccagccagccagacgcagacgcgccgagacagaacttaatgggcccgctaacagcgcgatttgctggtgacccaatgcgaccagatgctccacgcccagtcgcgtaccgtcttcatgggagaaaataatactgttgatgggtgtctggtcagagacatcaagaaataacgccggaacattagtgcaggcagcttccacagcaatggcatcctggtcatccagcggatagttaatgatcagcccactgacgcgttgcgcgagaagattgtgcaccgccgctttacaggcttcgacgccgcttcgttctaccatcgacaccaccacgctggcacccagttgatcggcgcgagatttaatcgccgcgacaatttgcgacggcgcgtgcagggccagactggaggtggcaacgccaatcagcaacgactgtttgcccgccagttgttgtgccacgcggttgggaatgtaattcagctccgccatcgccgcttccactttttcccgcgttttcgcagaaacgtggctggcctggttcaccacgcgggaaacggtctgataagagacaccggcatactctgcgacatcgtataacgttactggtttcac

SEQ ID NO: 5966 - DNA, 6518 bp, synthetic construct
  source 1..6518: mol_type = other DNA
attcaccaccctgaattgactctcttccgggcgctatcatgccataccgcgaaaggttttgcgccattcgatggtgtccgggattgacagctagctcagtcctaggtataatgctagcgtggagatatacctcgagcaattagattttgagggtgcttgtacacccatagggtgaggttaagaattacactcactaagtgtgaacaacacatacaactaccagcgtgatgacgttcgatagcaatcaataagcctaaatacgggcacctaaatacaatatgggacaaacaccgataaagtttttttgaacgattgaaaatggatacttttaatgaagtgtccagaaatcgtcaaatattagatagaacccttgggatattgcttctccttataggtatcgcaattgggattttccttattcctgattttttaccactacttaaaaggactccttatttattgctcgaacccgatgcaggtgtaagacatgagcttggatacgcttggtttatgcaatcaattggttggatcattgcttttttcgcatttaggagcagtagggcatttttaagggatagcaagaaaccaactagtaccagtaattaaatcaaaggtgaaagaggtatatagttgcctaaacaccatatacaactcactgaaaaaccgctccgaaacgcaatattctgtgatgacagccattcatccggtaggctaaagtatgtaaaaagaagctaatgtcatcttcccttttctcctcgaggcggccgcaaatgaaaaaattacaagaagtttttttgagagcgttcgctctcatttaggggtttttattatatttatccctgaaataacatatttgcgaaacttgttaagttaataatattagaagcattcgctttgattctcgcatcaaaaactggtaatttttaacgacgagatgataagtgcaaatgctcacggcccgggcgtgagcttacttattgtcgtgcggtataccagtaccttgatgctataggttaagttttcacgccctctttatcttatttaaaaagggctttctcaacttttcaaagctatcttctctttatccttttttaagaaatcgcatcagctttaaaagcataatcaattttaaccatggtgcattgaccatcttaaacgaggcctgttgcggccgcaataatagactagcataaccccttggggcctctaaacgggtcttgaggggttttttgctgaacgtacgttttacggctagctcagtcctaggtactatgctagcgtggagatatacggtaccaaggaggtaaataatgggagactacaaagaccatgacggtgattataaagatcatgacatcgattacaaggatgacgatgacaagggaggatccggcagcatgggaaaatcaacactaaagcacactaggaagattcagatcttgatcgacctgccgacgaaagacgagaagaaagaggttatggatatgatgtatcagtggcgtgatcgttgcttccgcgcagcgaacattatcgtgacccatctgtacgttcaggagatgatcaaggacttcttttatctgagcgaaggtattaagtacaaactcgcggatgagaaaaaagacgaaaagggcatcctgcaacgtagccgtatgaacaccacctatcgcgtggtgagcgaccgttttaagggcgagatgccgacgaatatcctttccaccctgaaccacggcctgatcagcagctttaacaaaaaccgcgtccagtattggaaaggcgaacgtagcctgccaaatttcaaaaaggacatggcattcccgtttggtctgcaaggtatctctcgtctggtgtatgatgaagaaaaaaaggcgttctgctttagattgtaccgcgttccgtttaaaacgtacttgggtaaggacttcaccgataaacgcatgctgctggagcgcctagtcaaaggagacgttaagctgtgtgcgtcgaacattcaactgaatggtggtaagatcttttggctggctgtattcgaaattgaaaaggagaagcacagcctcaaaccggaagtgattgccgaagcttcgctctccttggagtatccgattgttgtgaagactggtaagaaccgtctgaccattggtactaaagaagagttcctgtaccgcagattggcgattcaagcggcgcgtcgtcgtacccaggttggtgcaacctacagccgttctggtaagggtaagaagcgcaaattaaaagccgtcgataaataccataaaacggaatcaaactatgtggcgcatcgtattcacgtttacagccgtaagttaatcgatttctgcattaaacaccaagcgggcaccctgatccttatgaatcaggaggacaaagttggcatcgccaaagaggaggagttcgtgctgcgtaattggtcctattacgaactgatgaccaaaatcaagtacaaagctgagaaggctggcatcgaattgattatcggctaaggctccggaagaaggagatatacatatgttatattcagattttgaattgctaaaaattggcgacactagtgcgttggaccatatccatgcaaaatactttcgttccatcctgtggatcggccgtcagtggctgaacgatgattttttgatcgagtctctggttcaggatacgtttctaaagctgtgggttaatagagataagctggaaagcccggaacacattttttacttcttgcgtttcgtgatgaagcgcgagtgcattagctattaccgtaaaccaaaatacaaatttcataaaaaagtgaacagcttggaggattacgacaactatcaggactatatggtgggttatgatccggttaacgactctgagaacctggacgaacaagaaagcacccagaaatccttcgaccacattaaatcgattcttccgctgctgaatgcggataagcgccatctgatcgagttatgtctgaagtacggtttccaatataaggcgatcagcaaagttatgggtaaaggtattcacgaaaccagccgtgaaatcaaagaagccatcgaggacatcaagaccattgtccacaagggcaacgagctcggcagcaatgacaccatgaccaatgaaatcaagtttagcggtgaattatccgaggaacaggctaaggtgctgaagatgcgctgcgatttgaagtacagcttctctgagattgccaaggagctggaactgtccgagaaagaggtacaccaagagttcatgaaggcatataaactgatgaaagcgaaccaccagttgcaactgcaaagcgcgtaataagaattcctgctgccaccgctgagcaataactagcataaccccttggggcctctaaacgggtcttgaggggttttttgctgaaacctcaggcatttgagaagcacacggtcacactgcttccggtagtcaataaaccggtaaaccagcaatagacataagcggctatttaacgaccctgccctgaaccgacgaccgggtcatcgtggccggatcttgcggcccctcggcttgaacgaattgttagacattatttgccgactaccttggtgatctcgcctttcacgtagtggacaaattcttccaactgatctgcgcgcgaggccaagcgatcttcttcttgtccaagataagcctgtctagcttcaagtatgacgggctgatactgggccggcaggcgctccattgcccagtcggcagcgacatccttcggcgcgattttgccggttactgcgctgtaccaaatgcgggacaacgtaagcactacatttcgctcatcgccagcccagtcgggcggcgagttccatagcgttaaggtttcatttagcgcctcaaatagatcctgttcaggaaccggatcaaagagttcctccgccgctggacctaccaaggcaacgctatgttctcttgcttttgtcagcaagatagccagatcaatgtcgatcgtggctggctcgaagatacctgcaagaatgtcattgcgctgccattctccaaattgcagttcgcgcttagctggataacgccacggaatgatgtcgtcgtgcacaacaatggtgacttctacagcgcggagaatctcgctctctccaggggaagccgaagtttccaaaaggtcgttgatcaaagctcgccgcgttgtttcatcaagccttacggtcaccgtaaccagcaaatcaatatcactgtgtggcttcaggccgccatccactgcggagccgtacaaatgtacggccagcaacgtcggttcgagatggcgctcgatgacgccaactacctctgatagttgagtcgatacttcggcgatcaccgcttccctcatactcttcctttttcaatattattgaagcatttatcagggttattgtctcatgagcggatacatatttgaatgtatttagaaaaataaacaaatagctagctcactcggtcgctacgctccgggcgtgagactgcggcgggcgctgcggacacatacaaagttacccacagattccgtggataagcaggggactaacatgtgaggcaaaacagcagggccgcgccggtggcgtttttccataggctccgccctcctgccagagttcacataaacagacgcttttccggtgcatctgtgggagccgtgaggctcaaccatgaatctgacagtacgggcgaaacccgacaggacttaaagatccccaccgtttccggcgggtcgctccctcttgcgctctcctgttccgaccctgccgtttaccggatacctgttccgcctttctcccttacgggaagtgtggcgctttctcatagctcacacactggtatctcggctcggtgtaggtcgttcgctccaagctgggctgtaagcaagaactccccgttcagcccgactgctgcgccttatccggtaactgttcacttgagtccaacccggaaaagcacggtaaaacgccactggcagcagccattggtaactgggagttcgcagaggatttgtttagctaaacacgcggttgctcttgaagtgtgcgccaaagtccggctacactggaaggacagatttggttgctgtgctctgcgaaagccagttaccacggttaagcagttccccaactgacttaaccttcgatcaaaccacctccccaggtggttttttcgtttacagggcaaaagattacgcgcagaaaaaaaggatctcaagaagatcctttgatcttttctactgaaccgctctagatttcagtgcaatttatctcttcaaatgtagcacctgaagtcagccccatacgatataagttgtaattctcatgttagtcatgccccgcgcccaccggaaggagctgactgggttgaaggctctcaagggcatcggtcgagatcccggtgcctaatgagtgagctaacttacattaattgcgttgcgctcactgcccgctttccagtcgggaaacctgtcgtgccagctgcattaatgaatcggccaacgcgcggggagaggcggtttgcgtattgggcgccagggtggtttttcttttcaccagtgagacgggcaacagctgattgcccttcaccgcctggccctgagagagttgcagcaagcggtccacgctggtttgccccagcaggcgaaaatcctgtttgatggtggttaacggcgggatataacatgagctgtcttcggtatcgtcgtatcccactaccgagatgtccgcaccaacgcgcagcccggactcggtaatggcgcgcattgcgcccagcgccatctgatcgttggcaaccagcatcgcagtgggaacgatgccctcattcagcatttgcatggtttgttgaaaaccggacatggcactccagtcgccttcccgttccgctatcggctgaatttgattgcgagtgagatatttatgccagccagccagacgcagacgcgccgagacagaacttaatgggcccgctaacagcgcgatttgctggtgacccaatgcgaccagatgctccacgcccagtcgcgtaccgtcttcatgggagaaaataatactgttgatgggtgtctggtcagagacatcaagaaataacgccggaacattagtgcaggcagcttccacagcaatggcatcctggtcatccagcggatagttaatgatcagcccactgacgcgttgcgcgagaagattgtgcaccgccgctttacaggcttcgacgccgcttcgttctaccatcgacaccaccacgctggcacccagttgatcggcgcgagatttaatcgccgcgacaatttgcgacggcgcgtgcagggccagactggaggtggcaacgccaatcagcaacgactgtttgcccgccagttgttgtgccacgcggttgggaatgtaattcagctccgccatcgccgcttccactttttcccgcgttttcgcagaaacgtggctggcctggttcaccacgcgggaaacggtctgataagagacaccggcatactctgcgacatcgtataacgttactggtttcac

SEQ ID NO: 5967 - DNA, 6836 bp, synthetic construct
  source 1..6836: mol_type = other DNA
attcaccaccctgaattgactctcttccgggcgctatcatgccataccgcgaaaggttttgcgccattcgatggtgtccgggattgacagctagctcagtcctaggtataatgctagcgtggagatatacctcgagcaattagattttgagggtgcttgtacacccatagggtgaggttaagaattacactcactaagtgtgaacaacacatacaacttgtgggatatacgctaacaatagcaatcaataagcctaaatacgggcacctaaatacaatatgggacaaacaccgataaagtttttttgaacgattgaaaatggatacttttaatgaagtgtccagaaatcgtcaaatattagatagaacccttgggatattgcttctccttataggtatcgcaattgggattttccttattcctgattttttaccactacttaaaaggactccttatttattgctcgaacccgatgcaggtgtaagacatgagcttggatacgcttggtttatgcaatcaattggttggatcattgcttttttcgcatttaggagcagtagggcatttttaagggatagcaagaaaccaactagtaccagtaattaaatcaaaggtgaaagaggtatatagttgcctaaacaccatatacaactcactgaaaaaccgctccgaaacgcaatattctgtgatgacagccattcatccggtaggctaaagtatgtaaaaagaagctaatgtcatcttcccttttctcctcgaggcggccgcaaatgaaaaaattacaagaagtttttttgagagcgttcgctctcatttaggggtttttattatatttatccctgaaataacatatttgcgaaacttgttaagttaataatattagaagcattcgctttgattctcgcatcaaaaactggtaatttttaacgacgagatgataagtgcaaatgctcacggcccgggcgtgagcttacttattgtcgtgcggtataccagtaccttgatgctataggttaagttttcacgccctctttatcttatttaaaaagggctttctcaacttttcaaagctatcttctctttatccttttttaagaaatcgcatcagctttaaaagcataatcaattttaaccatggtgcattgaccatcttaaacgaggcctgttgcggccgcaataatagactagcataaccccttggggcctctaaacgggtcttgaggggttttttgctgaacgtacgttttacggctagctcagtcctaggtactatgctagcgtggagatatacggtaccaaggaggtaaataatgggaaaatcaacactaaagcacactaggaagattcagatcttgatcgacctgccgacgaaagacgagaagaaagaggttatggatatgatgtatcagtggcgtgatcgttgcttccgcgcagcgaacattatcgtgacccatctgtacgttcaggagatgatcaaggacttcttttatctgagcgaaggtattaagtacaaactcgcggatgagaaaaaagacgaaaagggcatcctgcaacgtagccgtatgaacaccacctatcgcgtggtgagcgaccgttttaagggcgagatgccgacgaatatcctttccaccctgaaccacggcctgatcagcagctttaacaaaaaccgcgtccagtattggaaaggcgaacgtagcctgccaaatttcaaaaaggacatggcattcccgtttggtctgcaaggtatctctcgtctggtgtatgatgaagaaaaaaaggcgttctgctttagattgtaccgcgttccgtttaaaacgtacttgggtaaggacttcaccgataaacgcatgctgctggagcgcctagtcaaaggagacgttaagctgtgtgcgtcgaacattcaactgaatggtggtaagatcttttggctggctgtattcgaaattgaaaaggagaagcacagcctcaaaccggaagtgattgccgaagcttcgctctccttggagtatccgattgttgtgaagactggtaagaaccgtctgaccattggtactaaagaagagttcctgtaccgcagattggcgattcaagcggcgcgtcgtcgtacccaggttggtgcaacctacagccgttctggtaagggtaagaagcgcaaattaaaagccgtcgataaataccataaaacggaatcaaactatgtggcgcatcgtattcacgtttacagccgtaagttaatcgatttctgcattaaacaccaagcgggcaccctgatccttatgaatcaggaggacaaagttggcatcgccaaagaggaggagttcgtgctgcgtaattggtcctattacgaactgatgaccaaaatcaagtacaaagctgagaaggctggcatcgaattgattatcggctaaggctccggaagaaggagatatacatatgttatattcagattttgaattgctaaaaattggcgacactagtgcgttggaccatatccatgcaaaatactttcgttccatcctgtggatcggccgtcagtggctgaacgatgattttttgatcgagtctctggttcaggatacgtttctaaagctgtgggttaatagagataagctggaaagcccggaacacattttttacttcttgcgtttcgtgatgaagcgcgagtgcattagctattaccgtaaaccaaaatacaaatttcataaaaaagtgaacagcttggaggattacgacaactatcaggactatatggtgggttatgatccggttaacgactctgagaacctggacgaacaagaaagcacccagaaatccttcgaccacattaaatcgattcttccgctgctgaatgcggataagcgccatctgatcgagttatgtctgaagtacggtttccaatataaggcgatcagcaaagttatgggtaaaggtattcacgaaaccagccgtgaaatcaaagaagccatcgaggacatcaagaccattgtccacaagggcaacgagctcggcagcaatgacaccatgaccaatgaaatcaagtttagcggtgaattatccgaggaacaggctaaggtgctgaagatgcgctgcgatttgaagtacagcttctctgagattgccaaggagctggaactgtccgagaaagaggtacaccaagagttcatgaaggcatataaactgatgaaagcgaaccaccagttgcaactgcaaagcgcgtaagtccttaagccaaggagacgtaccatgctaatggctgataagaacacaaataaatcgaaggtctatttcagcgataaatacgtgtgcaagttcatcagcgaagagtggctgaccagcaaggacacctccgcgcgtaaatacggtaaaatctacggcgtgaactaccatgttattgaaaagatccagcaagagaatggttataacattccgctgagcaccctgtctacgatttgttttaaccacggcatcaaattgtccgacttctttaaattggttgagaagaagtacggtgaatttctgaatgatagctatgagtataaaggaggatccggcagcgactacaaagaccatgacggtgattataaagatcatgacatcgattacaaggatgacgatgacaagtaataagaattcctgctgccaccgctgagcaataactagcataaccccttggggcctctaaacgggtcttgaggggttttttgctgaaacctcaggcatttgagaagcacacggtcacactgcttccggtagtcaataaaccggtaaaccagcaatagacataagcggctatttaacgaccctgccctgaaccgacgaccgggtcatcgtggccggatcttgcggcccctcggcttgaacgaattgttagacattatttgccgactaccttggtgatctcgcctttcacgtagtggacaaattcttccaactgatctgcgcgcgaggccaagcgatcttcttcttgtccaagataagcctgtctagcttcaagtatgacgggctgatactgggccggcaggcgctccattgcccagtcggcagcgacatccttcggcgcgattttgccggttactgcgctgtaccaaatgcgggacaacgtaagcactacatttcgctcatcgccagcccagtcgggcggcgagttccatagcgttaaggtttcatttagcgcctcaaatagatcctgttcaggaaccggatcaaagagttcctccgccgctggacctaccaaggcaacgctatgttctcttgcttttgtcagcaagatagccagatcaatgtcgatcgtggctggctcgaagatacctgcaagaatgtcattgcgctgccattctccaaattgcagttcgcgcttagctggataacgccacggaatgatgtcgtcgtgcacaacaatggtgacttctacagcgcggagaatctcgctctctccaggggaagccgaagtttccaaaaggtcgttgatcaaagctcgccgcgttgtttcatcaagccttacggtcaccgtaaccagcaaatcaatatcactgtgtggcttcaggccgccatccactgcggagccgtacaaatgtacggccagcaacgtcggttcgagatggcgctcgatgacgccaactacctctgatagttgagtcgatacttcggcgatcaccgcttccctcatactcttcctttttcaatattattgaagcatttatcagggttattgtctcatgagcggatacatatttgaatgtatttagaaaaataaacaaatagctagctcactcggtcgctacgctccgggcgtgagactgcggcgggcgctgcggacacatacaaagttacccacagattccgtggataagcaggggactaacatgtgaggcaaaacagcagggccgcgccggtggcgtttttccataggctccgccctcctgccagagttcacataaacagacgcttttccggtgcatctgtgggagccgtgaggctcaaccatgaatctgacagtacgggcgaaacccgacaggacttaaagatccccaccgtttccggcgggtcgctccctcttgcgctctcctgttccgaccctgccgtttaccggatacctgttccgcctttctcccttacgggaagtgtggcgctttctcatagctcacacactggtatctcggctcggtgtaggtcgttcgctccaagctgggctgtaagcaagaactccccgttcagcccgactgctgcgccttatccggtaactgttcacttgagtccaacccggaaaagcacggtaaaacgccactggcagcagccattggtaactgggagttcgcagaggatttgtttagctaaacacgcggttgctcttgaagtgtgcgccaaagtccggctacactggaaggacagatttggttgctgtgctctgcgaaagccagttaccacggttaagcagttccccaactgacttaaccttcgatcaaaccacctccccaggtggttttttcgtttacagggcaaaagattacgcgcagaaaaaaaggatctcaagaagatcctttgatcttttctactgaaccgctctagatttcagtgcaatttatctcttcaaatgtagcacctgaagtcagccccatacgatataagttgtaattctcatgttagtcatgccccgcgcccaccggaaggagctgactgggttgaaggctctcaagggcatcggtcgagatcccggtgcctaatgagtgagctaacttacattaattgcgttgcgctcactgcccgctttccagtcgggaaacctgtcgtgccagctgcattaatgaatcggccaacgcgcggggagaggcggtttgcgtattgggcgccagggtggtttttcttttcaccagtgagacgggcaacagctgattgcccttcaccgcctggccctgagagagttgcagcaagcggtccacgctggtttgccccagcaggcgaaaatcctgtttgatggtggttaacggcgggatataacatgagctgtcttcggtatcgtcgtatcccactaccgagatgtccgcaccaacgcgcagcccggactcggtaatggcgcgcattgcgcccagcgccatctgatcgttggcaaccagcatcgcagtgggaacgatgccctcattcagcatttgcatggtttgttgaaaaccggacatggcactccagtcgccttcccgttccgctatcggctgaatttgattgcgagtgagatatttatgccagccagccagacgcagacgcgccgagacagaacttaatgggcccgctaacagcgcgatttgctggtgacccaatgcgaccagatgctccacgcccagtcgcgtaccgtcttcatgggagaaaataatactgttgatgggtgtctggtcagagacatcaagaaataacgccggaacattagtgcaggcagcttccacagcaatggcatcctggtcatccagcggatagttaatgatcagcccactgacgcgttgcgcgagaagattgtgcaccgccgctttacaggcttcgacgccgcttcgttctaccatcgacaccaccacgctggcacccagttgatcggcgcgagatttaatcgccgcgacaatttgcgacggcgcgtgcagggccagactggaggtggcaacgccaatcagcaacgactgtttgcccgccagttgttgtgccacgcggttgggaatgtaattcagctccgccatcgccgcttccactttttcccgcgttttcgcagaaacgtggctggcctggttcaccacgcgggaaacggtctgataagagacaccggcatactctgcgacatcgtataacgttactggtttcac

SEQ ID NO: 5968 - DNA, 4903 bp, synthetic construct
  source 1..4903: mol_type = other DNA
attcaccaccctgaattgactctcttccgggcgctatcatgccataccgcgaaaggttttgcgccattcgatggtgtccgggattgacagctagctcagtcctaggtataatgctagcgtggagatatacctcgagcaattagattttgagggtgcttgtacacccatagggtgaggttaagaattacactcactaagtgtgaacaacacatacaactaccagcgtgatgacgttcgatagcaatcaataagcctaaatacgggcacctaaatacaatatgggacaaacaccgataaagtttttttgaacgattgaaaatggatacttttaatgaagtgtccagaaatcgtcaaatattagatagaacccttgggatattgcttctccttataggtatcgcaattgggattttccttattcctgattttttaccactacttaaaaggactccttatttattgctcgaacccgatgcaggtgtaagacatgagcttggatacgcttggtttatgcaatcaattggttggatcattgcttttttcgcatttaggagcagtagggcatttttaagggatagcaagaaaccaactagtaccagtaattaaatcaaaggtgaaagaggtatatagttgcctaaacaccatatacaactcactgaaaaaccgctccgaaacgcaatattctgtgatgacagccattcatccggtaggctaaagtatgtaaaaagaagctaatgtcatcttcccttttctcctcgaggcggccgcaaatgaaaaaattacaagaagtttttttgagagcgttcgctctcatttaggggtttttattatatttatccctgaaataacatatttgcgaaacttgttaagttaataatattagaagcattcgctttgattctcgcatcaaaaactggtaatttttaacgacgagatgataagtgcaaatgctcacggcccgggcgtgagcttacttattgtcgtgcggtataccagtaccttgatgctataggttaagttttcacgccctctttatcttatttaaaaagggctttctcaacttttcaaagctatcttctctttatccttttttaagaaatcgcatcagctttaaaagcataatcaattttaaccatggtgcattgaccatcttaaacgaggcctgttgcggccgcaataatagactagcataaccccttggggcctctaaacgggtcttgaggggttttttgctgaacgtacgttttacggctagctcagtcctaggtactatgctagcgtggagatatacggtaccaaggaggtaaataatgctaatggctgataagaacacaaataaatcgaaggtctatttcagcgataaatacgtgtgcaagttcatcagcgaagagtggctgaccagcaaggacacctccgcgcgtaaatacggtaaaatctacggcgtgaactaccatgttattgaaaagatccagcaagagaatggttataacattccgctgagcaccctgtctacgatttgttttaaccacggcatcaaattgtccgacttctttaaattggttgagaagaagtacggtgaatttctgaatgatagctatgagtataaaggaggatccggcagcgactacaaagaccatgacggtgattataaagatcatgacatcgattacaaggatgacgatgacaagtaataagaattcctgctgccaccgctgagcaataactagcataaccccttggggcctctaaacgggtcttgaggggttttttgctgaaacctcaggcatttgagaagcacacggtcacactgcttccggtagtcaataaaccggtaaaccagcaatagacataagcggctatttaacgaccctgccctgaaccgacgaccgggtcatcgtggccggatcttgcggcccctcggcttgaacgaattgttagacattatttgccgactaccttggtgatctcgcctttcacgtagtggacaaattcttccaactgatctgcgcgcgaggccaagcgatcttcttcttgtccaagataagcctgtctagcttcaagtatgacgggctgatactgggccggcaggcgctccattgcccagtcggcagcgacatccttcggcgcgattttgccggttactgcgctgtaccaaatgcgggacaacgtaagcactacatttcgctcatcgccagcccagtcgggcggcgagttccatagcgttaaggtttcatttagcgcctcaaatagatcctgttcaggaaccggatcaaagagttcctccgccgctggacctaccaaggcaacgctatgttctcttgcttttgtcagcaagatagccagatcaatgtcgatcgtggctggctcgaagatacctgcaagaatgtcattgcgctgccattctccaaattgcagttcgcgcttagctggataacgccacggaatgatgtcgtcgtgcacaacaatggtgacttctacagcgcggagaatctcgctctctccaggggaagccgaagtttccaaaaggtcgttgatcaaagctcgccgcgttgtttcatcaagccttacggtcaccgtaaccagcaaatcaatatcactgtgtggcttcaggccgccatccactgcggagccgtacaaatgtacggccagcaacgtcggttcgagatggcgctcgatgacgccaactacctctgatagttgagtcgatacttcggcgatcaccgcttccctcatactcttcctttttcaatattattgaagcatttatcagggttattgtctcatgagcggatacatatttgaatgtatttagaaaaataaacaaatagctagctcactcggtcgctacgctccgggcgtgagactgcggcgggcgctgcggacacatacaaagttacccacagattccgtggataagcaggggactaacatgtgaggcaaaacagcagggccgcgccggtggcgtttttccataggctccgccctcctgccagagttcacataaacagacgcttttccggtgcatctgtgggagccgtgaggctcaaccatgaatctgacagtacgggcgaaacccgacaggacttaaagatccccaccgtttccggcgggtcgctccctcttgcgctctcctgttccgaccctgccgtttaccggatacctgttccgcctttctcccttacgggaagtgtggcgctttctcatagctcacacactggtatctcggctcggtgtaggtcgttcgctccaagctgggctgtaagcaagaactccccgttcagcccgactgctgcgccttatccggtaactgttcacttgagtccaacccggaaaagcacggtaaaacgccactggcagcagccattggtaactgggagttcgcagaggatttgtttagctaaacacgcggttgctcttgaagtgtgcgccaaagtccggctacactggaaggacagatttggttgctgtgctctgcgaaagccagttaccacggttaagcagttccccaactgacttaaccttcgatcaaaccacctccccaggtggttttttcgtttacagggcaaaagattacgcgcagaaaaaaaggatctcaagaagatcctttgatcttttctactgaaccgctctagatttcagtgcaatttatctcttcaaatgtagcacctgaagtcagccccatacgatataagttgtaattctcatgttagtcatgccccgcgcccaccggaaggagctgactgggttgaaggctctcaagggcatcggtcgagatcccggtgcctaatgagtgagctaacttacattaattgcgttgcgctcactgcccgctttccagtcgggaaacctgtcgtgccagctgcattaatgaatcggccaacgcgcggggagaggcggtttgcgtattgggcgccagggtggtttttcttttcaccagtgagacgggcaacagctgattgcccttcaccgcctggccctgagagagttgcagcaagcggtccacgctggtttgccccagcaggcgaaaatcctgtttgatggtggttaacggcgggatataacatgagctgtcttcggtatcgtcgtatcccactaccgagatgtccgcaccaacgcgcagcccggactcggtaatggcgcgcattgcgcccagcgccatctgatcgttggcaaccagcatcgcagtgggaacgatgccctcattcagcatttgcatggtttgttgaaaaccggacatggcactccagtcgccttcccgttccgctatcggctgaatttgattgcgagtgagatatttatgccagccagccagacgcagacgcgccgagacagaacttaatgggcccgctaacagcgcgatttgctggtgacccaatgcgaccagatgctccacgcccagtcgcgtaccgtcttcatgggagaaaataatactgttgatgggtgtctggtcagagacatcaagaaataacgccggaacattagtgcaggcagcttccacagcaatggcatcctggtcatccagcggatagttaatgatcagcccactgacgcgttgcgcgagaagattgtgcaccgccgctttacaggcttcgacgccgcttcgttctaccatcgacaccaccacgctggcacccagttgatcggcgcgagatttaatcgccgcgacaatttgcgacggcgcgtgcagggccagactggaggtggcaacgccaatcagcaacgactgtttgcccgccagttgttgtgccacgcggttgggaatgtaattcagctccgccatcgccgcttccactttttcccgcgttttcgcagaaacgtggctggcctggttcaccacgcgggaaacggtctgataagagacaccggcatactctgcgacatcgtataacgttactggtttcac

SEQ ID NO: 5969 - DNA, 5912 bp, synthetic construct
  source 1..5912: mol_type = other DNA
attcaccaccctgaattgactctcttccgggcgctatcatgccataccgcgaaaggttttgcgccattcgatggtgtccgggattgacagctagctcagtcctaggtataatgctagcgtggagatatacctcgagcaattagattttgagggtgcttgtacacccatagggtgaggttaagaattacactcactaagtgtgaacaacacatacaactaccagcgtgatgacgttcggcggccgcaataatagactagcataaccccttggggcctctaaacgggtcttgaggggttttttgctgaacgtacgttttacggctagctcagtcctaggtactatgctagcgtggagatatacggtaccaaggaggtaaataatgggagactacaaagaccatgacggtgattataaagatcatgacatcgattacaaggatgacgatgacaagggaggatccggcagcatgggaaaatcaacactaaagcacactaggaagattcagatcttgatcgacctgccgacgaaagacgagaagaaagaggttatggatatgatgtatcagtggcgtgatcgttgcttccgcgcagcgaacattatcgtgacccatctgtacgttcaggagatgatcaaggacttcttttatctgagcgaaggtattaagtacaaactcgcggatgagaaaaaagacgaaaagggcatcctgcaacgtagccgtatgaacaccacctatcgcgtggtgagcgaccgttttaagggcgagatgccgacgaatatcctttccaccctgaaccacggcctgatcagcagctttaacaaaaaccgcgtccagtattggaaaggcgaacgtagcctgccaaatttcaaaaaggacatggcattcccgtttggtctgcaaggtatctctcgtctggtgtatgatgaagaaaaaaaggcgttctgctttagattgtaccgcgttccgtttaaaacgtacttgggtaaggacttcaccgataaacgcatgctgctggagcgcctagtcaaaggagacgttaagctgtgtgcgtcgaacattcaactgaatggtggtaagatcttttggctggctgtattcgaaattgaaaaggagaagcacagcctcaaaccggaagtgattgccgaagcttcgctctccttggagtatccgattgttgtgaagactggtaagaaccgtctgaccattggtactaaagaagagttcctgtaccgcagattggcgattcaagcggcgcgtcgtcgtacccaggttggtgcaacctacagccgttctggtaagggtaagaagcgcaaattaaaagccgtcgataaataccataaaacggaatcaaactatgtggcgcatcgtattcacgtttacagccgtaagttaatcgatttctgcattaaacaccaagcgggcaccctgatccttatgaatcaggaggacaaagttggcatcgccaaagaggaggagttcgtgctgcgtaattggtcctattacgaactgatgaccaaaatcaagtacaaagctgagaaggctggcatcgaattgattatcggctaaggctccggaagaaggagatatacatatgttatattcagattttgaattgctaaaaattggcgacactagtgcgttggaccatatccatgcaaaatactttcgttccatcctgtggatcggccgtcagtggctgaacgatgattttttgatcgagtctctggttcaggatacgtttctaaagctgtgggttaatagagataagctggaaagcccggaacacattttttacttcttgcgtttcgtgatgaagcgcgagtgcattagctattaccgtaaaccaaaatacaaatttcataaaaaagtgaacagcttggaggattacgacaactatcaggactatatggtgggttatgatccggttaacgactctgagaacctggacgaacaagaaagcacccagaaatccttcgaccacattaaatcgattcttccgctgctgaatgcggataagcgccatctgatcgagttatgtctgaagtacggtttccaatataaggcgatcagcaaagttatgggtaaaggtattcacgaaaccagccgtgaaatcaaagaagccatcgaggacatcaagaccattgtccacaagggcaacgagctcggcagcaatgacaccatgaccaatgaaatcaagtttagcggtgaattatccgaggaacaggctaaggtgctgaagatgcgctgcgatttgaagtacagcttctctgagattgccaaggagctggaactgtccgagaaagaggtacaccaagagttcatgaaggcatataaactgatgaaagcgaaccaccagttgcaactgcaaagcgcgtaagtccttaagccaaggagacgtaccatgctaatggctgataagaacacaaataaatcgaaggtctatttcagcgataaatacgtgtgcaagttcatcagcgaagagtggctgaccagcaaggacacctccgcgcgtaaatacggtaaaatctacggcgtgaactaccatgttattgaaaagatccagcaagagaatggttataacattccgctgagcaccctgtctacgatttgttttaaccacggcatcaaattgtccgacttctttaaattggttgagaagaagtacggtgaatttctgaatgatagctatgagtataaataataagaattcctgctgccaccgctgagcaataactagcataaccccttggggcctctaaacgggtcttgaggggttttttgctgaaacctcaggcatttgagaagcacacggtcacactgcttccggtagtcaataaaccggtaaaccagcaatagacataagcggctatttaacgaccctgccctgaaccgacgaccgggtcatcgtggccggatcttgcggcccctcggcttgaacgaattgttagacattatttgccgactaccttggtgatctcgcctttcacgtagtggacaaattcttccaactgatctgcgcgcgaggccaagcgatcttcttcttgtccaagataagcctgtctagcttcaagtatgacgggctgatactgggccggcaggcgctccattgcccagtcggcagcgacatccttcggcgcgattttgccggttactgcgctgtaccaaatgcgggacaacgtaagcactacatttcgctcatcgccagcccagtcgggcggcgagttccatagcgttaaggtttcatttagcgcctcaaatagatcctgttcaggaaccggatcaaagagttcctccgccgctggacctaccaaggcaacgctatgttctcttgcttttgtcagcaagatagccagatcaatgtcgatcgtggctggctcgaagatacctgcaagaatgtcattgcgctgccattctccaaattgcagttcgcgcttagctggataacgccacggaatgatgtcgtcgtgcacaacaatggtgacttctacagcgcggagaatctcgctctctccaggggaagccgaagtttccaaaaggtcgttgatcaaagctcgccgcgttgtttcatcaagccttacggtcaccgtaaccagcaaatcaatatcactgtgtggcttcaggccgccatccactgcggagccgtacaaatgtacggccagcaacgtcggttcgagatggcgctcgatgacgccaactacctctgatagttgagtcgatacttcggcgatcaccgcttccctcatactcttcctttttcaatattattgaagcatttatcagggttattgtctcatgagcggatacatatttgaatgtatttagaaaaataaacaaatagctagctcactcggtcgctacgctccgggcgtgagactgcggcgggcgctgcggacacatacaaagttacccacagattccgtggataagcaggggactaacatgtgaggcaaaacagcagggccgcgccggtggcgtttttccataggctccgccctcctgccagagttcacataaacagacgcttttccggtgcatctgtgggagccgtgaggctcaaccatgaatctgacagtacgggcgaaacccgacaggacttaaagatccccaccgtttccggcgggtcgctccctcttgcgctctcctgttccgaccctgccgtttaccggatacctgttccgcctttctcccttacgggaagtgtggcgctttctcatagctcacacactggtatctcggctcggtgtaggtcgttcgctccaagctgggctgtaagcaagaactccccgttcagcccgactgctgcgccttatccggtaactgttcacttgagtccaacccggaaaagcacggtaaaacgccactggcagcagccattggtaactgggagttcgcagaggatttgtttagctaaacacgcggttgctcttgaagtgtgcgccaaagtccggctacactggaaggacagatttggttgctgtgctctgcgaaagccagttaccacggttaagcagttccccaactgacttaaccttcgatcaaaccacctccccaggtggttttttcgtttacagggcaaaagattacgcgcagaaaaaaaggatctcaagaagatcctttgatcttttctactgaaccgctctagatttcagtgcaatttatctcttcaaatgtagcacctgaagtcagccccatacgatataagttgtaattctcatgttagtcatgccccgcgcccaccggaaggagctgactgggttgaaggctctcaagggcatcggtcgagatcccggtgcctaatgagtgagctaacttacattaattgcgttgcgctcactgcccgctttccagtcgggaaacctgtcgtgccagctgcattaatgaatcggccaacgcgcggggagaggcggtttgcgtattgggcgccagggtggtttttcttttcaccagtgagacgggcaacagctgattgcccttcaccgcctggccctgagagagttgcagcaagcggtccacgctggtttgccccagcaggcgaaaatcctgtttgatggtggttaacggcgggatataacatgagctgtcttcggtatcgtcgtatcccactaccgagatgtccgcaccaacgcgcagcccggactcggtaatggcgcgcattgcgcccagcgccatctgatcgttggcaaccagcatcgcagtgggaacgatgccctcattcagcatttgcatggtttgttgaaaaccggacatggcactccagtcgccttcccgttccgctatcggctgaatttgattgcgagtgagatatttatgccagccagccagacgcagacgcgccgagacagaacttaatgggcccgctaacagcgcgatttgctggtgacccaatgcgaccagatgctccacgcccagtcgcgtaccgtcttcatgggagaaaataatactgttgatgggtgtctggtcagagacatcaagaaataacgccggaacattagtgcaggcagcttccacagcaatggcatcctggtcatccagcggatagttaatgatcagcccactgacgcgttgcgcgagaagattgtgcaccgccgctttacaggcttcgacgccgcttcgttctaccatcgacaccaccacgctggcacccagttgatcggcgcgagatttaatcgccgcgacaatttgcgacggcgcgtgcagggccagactggaggtggcaacgccaatcagcaacgactgtttgcccgccagttgttgtgccacgcggttgggaatgtaattcagctccgccatcgccgcttccactttttcccgcgttttcgcagaaacgtggctggcctggttcaccacgcgggaaacggtctgataagagacaccggcatactctgcgacatcgtataacgttactggtttcac

SEQ ID NO: 5970 - DNA, 5906 bp, synthetic construct
  source 1..5906: mol_type = other DNA
attcaccaccctgaattgactctcttccgggcgctatcatgccataccgcgaaaggttttgcgccattcgatggtgtccgggattgacagctagctcagtcctaggtataatgctagcgtggagatatacctcgagcaattagattttgagggtgcttgtacacccatagggtgaggttaagaattacactcactaagtgtgaacaacacatacaactaccagcgtgatgagcggccgcaataatagactagcataaccccttggggcctctaaacgggtcttgaggggttttttgctgaacgtacgttttacggctagctcagtcctaggtactatgctagcgtggagatatacggtaccaaggaggtaaataatgggagactacaaagaccatgacggtgattataaagatcatgacatcgattacaaggatgacgatgacaagggaggatccggcagcatgggaaaatcaacactaaagcacactaggaagattcagatcttgatcgacctgccgacgaaagacgagaagaaagaggttatggatatgatgtatcagtggcgtgatcgttgcttccgcgcagcgaacattatcgtgacccatctgtacgttcaggagatgatcaaggacttcttttatctgagcgaaggtattaagtacaaactcgcggatgagaaaaaagacgaaaagggcatcctgcaacgtagccgtatgaacaccacctatcgcgtggtgagcgaccgttttaagggcgagatgccgacgaatatcctttccaccctgaaccacggcctgatcagcagctttaacaaaaaccgcgtccagtattggaaaggcgaacgtagcctgccaaatttcaaaaaggacatggcattcccgtttggtctgcaaggtatctctcgtctggtgtatgatgaagaaaaaaaggcgttctgctttagattgtaccgcgttccgtttaaaacgtacttgggtaaggacttcaccgataaacgcatgctgctggagcgcctagtcaaaggagacgttaagctgtgtgcgtcgaacattcaactgaatggtggtaagatcttttggctggctgtattcgaaattgaaaaggagaagcacagcctcaaaccggaagtgattgccgaagcttcgctctccttggagtatccgattgttgtgaagactggtaagaaccgtctgaccattggtactaaagaagagttcctgtaccgcagattggcgattcaagcggcgcgtcgtcgtacccaggttggtgcaacctacagccgttctggtaagggtaagaagcgcaaattaaaagccgtcgataaataccataaaacggaatcaaactatgtggcgcatcgtattcacgtttacagccgtaagttaatcgatttctgcattaaacaccaagcgggcaccctgatccttatgaatcaggaggacaaagttggcatcgccaaagaggaggagttcgtgctgcgtaattggtcctattacgaactgatgaccaaaatcaagtacaaagctgagaaggctggcatcgaattgattatcggctaaggctccggaagaaggagatatacatatgttatattcagattttgaattgctaaaaattggcgacactagtgcgttggaccatatccatgcaaaatactttcgttccatcctgtggatcggccgtcagtggctgaacgatgattttttgatcgagtctctggttcaggatacgtttctaaagctgtgggttaatagagataagctggaaagcccggaacacattttttacttcttgcgtttcgtgatgaagcgcgagtgcattagctattaccgtaaaccaaaatacaaatttcataaaaaagtgaacagcttggaggattacgacaactatcaggactatatggtgggttatgatccggttaacgactctgagaacctggacgaacaagaaagcacccagaaatccttcgaccacattaaatcgattcttccgctgctgaatgcggataagcgccatctgatcgagttatgtctgaagtacggtttccaatataaggcgatcagcaaagttatgggtaaaggtattcacgaaaccagccgtgaaatcaaagaagccatcgaggacatcaagaccattgtccacaagggcaacgagctcggcagcaatgacaccatgaccaatgaaatcaagtttagcggtgaattatccgaggaacaggctaaggtgctgaagatgcgctgcgatttgaagtacagcttctctgagattgccaaggagctggaactgtccgagaaagaggtacaccaagagttcatgaaggcatataaactgatgaaagcgaaccaccagttgcaactgcaaagcgcgtaagtccttaagccaaggagacgtaccatgctaatggctgataagaacacaaataaatcgaaggtctatttcagcgataaatacgtgtgcaagttcatcagcgaagagtggctgaccagcaaggacacctccgcgcgtaaatacggtaaaatctacggcgtgaactaccatgttattgaaaagatccagcaagagaatggttataacattccgctgagcaccctgtctacgatttgttttaaccacggcatcaaattgtccgacttctttaaattggttgagaagaagtacggtgaatttctgaatgatagctatgagtataaataataagaattcctgctgccaccgctgagcaataactagcataaccccttggggcctctaaacgggtcttgaggggttttttgctgaaacctcaggcatttgagaagcacacggtcacactgcttccggtagtcaataaaccggtaaaccagcaatagacataagcggctatttaacgaccctgccctgaaccgacgaccgggtcatcgtggccggatcttgcggcccctcggcttgaacgaattgttagacattatttgccgactaccttggtgatctcgcctttcacgtagtggacaaattcttccaactgatctgcgcgcgaggccaagcgatcttcttcttgtccaagataagcctgtctagcttcaagtatgacgggctgatactgggccggcaggcgctccattgcccagtcggcagcgacatccttcggcgcgattttgccggttactgcgctgtaccaaatgcgggacaacgtaagcactacatttcgctcatcgccagcccagtcgggcggcgagttccatagcgttaaggtttcatttagcgcctcaaatagatcctgttcaggaaccggatcaaagagttcctccgccgctggacctaccaaggcaacgctatgttctcttgcttttgtcagcaagatagccagatcaatgtcgatcgtggctggctcgaagatacctgcaagaatgtcattgcgctgccattctccaaattgcagttcgcgcttagctggataacgccacggaatgatgtcgtcgtgcacaacaatggtgacttctacagcgcggagaatctcgctctctccaggggaagccgaagtttccaaaaggtcgttgatcaaagctcgccgcgttgtttcatcaagccttacggtcaccgtaaccagcaaatcaatatcactgtgtggcttcaggccgccatccactgcggagccgtacaaatgtacggccagcaacgtcggttcgagatggcgctcgatgacgccaactacctctgatagttgagtcgatacttcggcgatcaccgcttccctcatactcttcctttttcaatattattgaagcatttatcagggttattgtctcatgagcggatacatatttgaatgtatttagaaaaataaacaaatagctagctcactcggtcgctacgctccgggcgtgagactgcggcgggcgctgcggacacatacaaagttacccacagattccgtggataagcaggggactaacatgtgaggcaaaacagcagggccgcgccggtggcgtttttccataggctccgccctcctgccagagttcacataaacagacgcttttccggtgcatctgtgggagccgtgaggctcaaccatgaatctgacagtacgggcgaaacccgacaggacttaaagatccccaccgtttccggcgggtcgctccctcttgcgctctcctgttccgaccctgccgtttaccggatacctgttccgcctttctcccttacgggaagtgtggcgctttctcatagctcacacactggtatctcggctcggtgtaggtcgttcgctccaagctgggctgtaagcaagaactccccgttcagcccgactgctgcgccttatccggtaactgttcacttgagtccaacccggaaaagcacggtaaaacgccactggcagcagccattggtaactgggagttcgcagaggatttgtttagctaaacacgcggttgctcttgaagtgtgcgccaaagtccggctacactggaaggacagatttggttgctgtgctctgcgaaagccagttaccacggttaagcagttccccaactgacttaaccttcgatcaaaccacctccccaggtggttttttcgtttacagggcaaaagattacgcgcagaaaaaaaggatctcaagaagatcctttgatcttttctactgaaccgctctagatttcagtgcaatttatctcttcaaatgtagcacctgaagtcagccccatacgatataagttgtaattctcatgttagtcatgccccgcgcccaccggaaggagctgactgggttgaaggctctcaagggcatcggtcgagatcccggtgcctaatgagtgagctaacttacattaattgcgttgcgctcactgcccgctttccagtcgggaaacctgtcgtgccagctgcattaatgaatcggccaacgcgcggggagaggcggtttgcgtattgggcgccagggtggtttttcttttcaccagtgagacgggcaacagctgattgcccttcaccgcctggccctgagagagttgcagcaagcggtccacgctggtttgccccagcaggcgaaaatcctgtttgatggtggttaacggcgggatataacatgagctgtcttcggtatcgtcgtatcccactaccgagatgtccgcaccaacgcgcagcccggactcggtaatggcgcgcattgcgcccagcgccatctgatcgttggcaaccagcatcgcagtgggaacgatgccctcattcagcatttgcatggtttgttgaaaaccggacatggcactccagtcgccttcccgttccgctatcggctgaatttgattgcgagtgagatatttatgccagccagccagacgcagacgcgccgagacagaacttaatgggcccgctaacagcgcgatttgctggtgacccaatgcgaccagatgctccacgcccagtcgcgtaccgtcttcatgggagaaaataatactgttgatgggtgtctggtcagagacatcaagaaataacgccggaacattagtgcaggcagcttccacagcaatggcatcctggtcatccagcggatagttaatgatcagcccactgacgcgttgcgcgagaagattgtgcaccgccgctttacaggcttcgacgccgcttcgttctaccatcgacaccaccacgctggcacccagttgatcggcgcgagatttaatcgccgcgacaatttgcgacggcgcgtgcagggccagactggaggtggcaacgccaatcagcaacgactgtttgcccgccagttgttgtgccacgcggttgggaatgtaattcagctccgccatcgccgcttccactttttcccgcgttttcgcagaaacgtggctggcctggttcaccacgcgggaaacggtctgataagagacaccggcatactctgcgacatcgtataacgttactggtttcac

SEQ ID NO: 5971 - DNA, 6524 bp, synthetic construct
  source 1..6524: mol_type = other DNA
attcaccaccctgaattgactctcttccgggcgctatcatgccataccgcgaaaggttttgcgccattcgatggtgtccgggattgacagctagctcagtcctaggtataatgctagcgtggagatatacctcgagaatattttcgagggtgcttgtacacccgcaaggtgagctgaacatttcactcactaaatgcgcttagcatatacaactaccagcgtgatgacgttcgcattagaaaaagatcttaagccgagcatagttgaaaacttaaaaatctatcagcacttactattgctagtaaggaattgcctaatttaatgccttccttcgacgaaaatttgatatttttaaataaggttatccaatttcattttttaagaacagtaaattttacaaagtcgaatgcaattaaaattacctttaagaaacttgataaggagttcataaccaaatttcttacttattttaaaaaaacagactactcctcgaggcggccgcatattttacaaattatgttggaatatattacaacataaatattttatttatatatttatctcatattaatatatttgcgaaacttctttaagtaaaatattagaagcattcgctttgaatcttgtgtcagaaaactggtaatttttaaggaacgagatgataagtggtaatgctcacgacccgggcgtgagcttacttgtcgttccatggtataccagtacctctgatacaataagttaagtctcatgccctttctttttcgacttactttcaaagctaccttctctttacaacttgtaggaattggcttaacctaatccatttaaaaccttgaggttgttacctccacttaaaagcgactgcttgcggccgcaataatagactagcataaccccttggggcctctaaacgggtcttgaggggttttttgctgaacgtacgttttacggctagctcagtcctaggtactatgctagcgtggagatatacggtaccaaggaggtaaataatgggagactacaaagaccatgacggtgattataaagatcatgacatcgattacaaggatgacgatgacaagggaggatccggcagcatgggaaaagatacaataactctaacgaggtcgattcgtttggagatcgacctgccaacgcaggaggagcgccaggaggcgaaaagcaaactgtaccagtggcgttatcgctgccataaggccgctaatctgatcgtgagccacctgtacgtccaagagatgattcaagagttcttctatttgtctgaaggcgtgaagtataaattagtggacgagaagaaggacgaactgggtattttcaaccgctcacgtatgaacaccacttaccgcctggtgtctgatcgttataagggtaaaatgccgaccaatattctctctcagttgaatagcatcatccaaagcagctttaaaaagaaccgtgaagagtactggaaaggcgaacgtagcctgcagaattttaagaaggagatggctttcccgtttaccatggaaggtgtctgtggtctggagttcaacccggaaaagtccgcattctgcttccgctttttcagcattccggttaagacgtacatcggccgtgcatttaacgataaatggaaactgatgcatcaactgaccaagggcgagattaaaatgcgtacctcctatctgaaactgaaggacggcaaaatctttatgatggctgcgttcgagatggaaaaggagaagcaccagctgcgaccggaagtttttgcggaagcgcggctctccctggagtacccgattattgttaagatcggcaaggcgaagttgtccatcggtagccgtgaggagttcctgtaccgtcgtctggcgattcaagcagccagacgtcgcacccgtgagggcgttaagtacgcacgtagtggtaatggtcataagcgtaaaaccaaggcggcggcgcgtttcaaagacaaagaacgcaactatgtgaaccagcgccttcacgtgtatagccgcgaattgatcgatttttgcgttaaacaccaagcgggtactctgatcctggtagatcaggagcagaaaatcgaattggctaaagaggaagcgtttgttctgcgtaactggggttattacgatctgatgaccaaaatcaaatacaaagctgaaaaagccggtattgaattgataatcggctaaggctccggaagaaggagatatacatatgttacagaggatatttgaattgctacaacaaggtcacccggatgctctggagttcatccacacgaagtaccatcgtaatatcttttgggttggtaaacagattttagatgacgactttgcggtggaaaccctggttcaggatacctttctgatcctgtgggaaaaacgcgatcgcatcgagcgaccggagcacatttactacttcttgcgtatggttatgaaacgcgagtgctacacctattacgttcgtccgaagaacaaattctttaaaaccgttaatagcctggagagcttcgagaactatcaggagtacctgcatggttatgacccggaaaaggacgacctgcacctgctgaatcacgagatccaacaaaaagcgtttgaccgtatttctcgtgttctgccgctgttgtccccggagcgccgtcgtctgattgaactttgcttgaaatacgacttccgctataaggcgattggccagttgatgggcacctcgatcacccacacgtccaacgaagtcaagaaagcgatcgtggatattaaaaacattatctgtcagcgtagcattcaagagactaagccaaaaccggtgcttgccgtgaagatccaaagagaaatgacccaggagcaagagaaggtgctgcagttgcgcaccgaacgtcagtatagcttcgccgcaatcgcaaaagagctcaacctgtctgaaaaagaagttcatcaggagttcatgagcgcgtataagctgatgcagctgaagcacgaacagcaacaaagcgcgtaagtccttaagccaaggagacgtaccatgattatactagtagttgatagggctacaatgcaaaacaagaactataaagaggacttcctgctgaagttcggtgaaaactttggcaaaatccgccgttcgaaaagcctctcttttcgttccctgagccagaagtgcgacattgattacgcggatttaaataagatcgagcgcggtaaacgtaatattaccttgaccacgattatcgagctggcaagaggcctggacatccacgctcgtgaattgtttgatttcagcttcaccctgaaggacctggaaaaataataagaattcctgctgccaccgctgagcaataactagcataaccccttggggcctctaaacgggtcttgaggggttttttgctgaaacctcaggcatttgagaagcacacggtcacactgcttccggtagtcaataaaccggtaaaccagcaatagacataagcggctatttaacgaccctgccctgaaccgacgaccgggtcatcgtggccggatcttgcggcccctcggcttgaacgaattgttagacattatttgccgactaccttggtgatctcgcctttcacgtagtggacaaattcttccaactgatctgcgcgcgaggccaagcgatcttcttcttgtccaagataagcctgtctagcttcaagtatgacgggctgatactgggccggcaggcgctccattgcccagtcggcagcgacatccttcggcgcgattttgccggttactgcgctgtaccaaatgcgggacaacgtaagcactacatttcgctcatcgccagcccagtcgggcggcgagttccatagcgttaaggtttcatttagcgcctcaaatagatcctgttcaggaaccggatcaaagagttcctccgccgctggacctaccaaggcaacgctatgttctcttgcttttgtcagcaagatagccagatcaatgtcgatcgtggctggctcgaagatacctgcaagaatgtcattgcgctgccattctccaaattgcagttcgcgcttagctggataacgccacggaatgatgtcgtcgtgcacaacaatggtgacttctacagcgcggagaatctcgctctctccaggggaagccgaagtttccaaaaggtcgttgatcaaagctcgccgcgttgtttcatcaagccttacggtcaccgtaaccagcaaatcaatatcactgtgtggcttcaggccgccatccactgcggagccgtacaaatgtacggccagcaacgtcggttcgagatggcgctcgatgacgccaactacctctgatagttgagtcgatacttcggcgatcaccgcttccctcatactcttcctttttcaatattattgaagcatttatcagggttattgtctcatgagcggatacatatttgaatgtatttagaaaaataaacaaatagctagctcactcggtcgctacgctccgggcgtgagactgcggcgggcgctgcggacacatacaaagttacccacagattccgtggataagcaggggactaacatgtgaggcaaaacagcagggccgcgccggtggcgtttttccataggctccgccctcctgccagagttcacataaacagacgcttttccggtgcatctgtgggagccgtgaggctcaaccatgaatctgacagtacgggcgaaacccgacaggacttaaagatccccaccgtttccggcgggtcgctccctcttgcgctctcctgttccgaccctgccgtttaccggatacctgttccgcctttctcccttacgggaagtgtggcgctttctcatagctcacacactggtatctcggctcggtgtaggtcgttcgctccaagctgggctgtaagcaagaactccccgttcagcccgactgctgcgccttatccggtaactgttcacttgagtccaacccggaaaagcacggtaaaacgccactggcagcagccattggtaactgggagttcgcagaggatttgtttagctaaacacgcggttgctcttgaagtgtgcgccaaagtccggctacactggaaggacagatttggttgctgtgctctgcgaaagccagttaccacggttaagcagttccccaactgacttaaccttcgatcaaaccacctccccaggtggttttttcgtttacagggcaaaagattacgcgcagaaaaaaaggatctcaagaagatcctttgatcttttctactgaaccgctctagatttcagtgcaatttatctcttcaaatgtagcacctgaagtcagccccatacgatataagttgtaattctcatgttagtcatgccccgcgcccaccggaaggagctgactgggttgaaggctctcaagggcatcggtcgagatcccggtgcctaatgagtgagctaacttacattaattgcgttgcgctcactgcccgctttccagtcgggaaacctgtcgtgccagctgcattaatgaatcggccaacgcgcggggagaggcggtttgcgtattgggcgccagggtggtttttcttttcaccagtgagacgggcaacagctgattgcccttcaccgcctggccctgagagagttgcagcaagcggtccacgctggtttgccccagcaggcgaaaatcctgtttgatggtggttaacggcgggatataacatgagctgtcttcggtatcgtcgtatcccactaccgagatgtccgcaccaacgcgcagcccggactcggtaatggcgcgcattgcgcccagcgccatctgatcgttggcaaccagcatcgcagtgggaacgatgccctcattcagcatttgcatggtttgttgaaaaccggacatggcactccagtcgccttcccgttccgctatcggctgaatttgattgcgagtgagatatttatgccagccagccagacgcagacgcgccgagacagaacttaatgggcccgctaacagcgcgatttgctggtgacccaatgcgaccagatgctccacgcccagtcgcgtaccgtcttcatgggagaaaataatactgttgatgggtgtctggtcagagacatcaagaaataacgccggaacattagtgcaggcagcttccacagcaatggcatcctggtcatccagcggatagttaatgatcagcccactgacgcgttgcgcgagaagattgtgcaccgccgctttacaggcttcgacgccgcttcgttctaccatcgacaccaccacgctggcacccagttgatcggcgcgagatttaatcgccgcgacaatttgcgacggcgcgtgcagggccagactggaggtggcaacgccaatcagcaacgactgtttgcccgccagttgttgtgccacgcggttgggaatgtaattcagctccgccatcgccgcttccactttttcccgcgttttcgcagaaacgtggctggcctggttcaccacgcgggaaacggtctgataagagacaccggcatactctgcgacatcgtataacgttactggtttcac

SEQ ID NO: 5972 - DNA, 6748 bp, synthetic construct
  source 1..6748: mol_type = other DNA
attcaccaccctgaattgactctcttccgggcgctatcatgccataccgcgaaaggttttgcgccattcgatggtgtccgggattgacagctagctcagtcctaggtataatgctagcgtggagatatacctcgagaaagatttttttaggggctgtccgcacagccataggttggggctattcgcactcaataagtgaaagcatgcggttagtaccagcgtgatgacgttacatctaagcttgtaattccagtttttgtggcgtttaactggacttttgggattatttcggggatttattttctttttcaaatgaattttcattttccatttgcgctgataaaagtacacgtctacatttgaaactatagttaacctatagaataaatatattaaatctcctcgaggcggccgcactcttatgtattgcaatataaatatattagaaaacgatataaatttttgcttggtgtattgaaaaacgttatgtttatagcgaaaaaagataacatagtttttatgagactagttcttcctcaacctgaatattacaagatagcccttctgaatttgcttaagttgttgcagcttaaaggaataccaaaagaaagtattgaagacgtaaagcgtgtttacgaattgttggaaattttagatgctaacattaatgagcaaaacatttcttaagacccgcggccgcaataatagactagcataaccccttggggcctctaaacgggtcttgaggggttttttgctgaacgtacgttttacggctagctcagtcctaggtactatgctagcgtggagatatacggtaccaaggaggtaaataatgggagactacaaagaccatgacggtgattataaagatcatgacatcgattacaaggatgacgatgacaagggaggatccggcagcatggaaaaaataattctaacaaggaagatacaactggtgattccgtgtaaagaccgcgaaatcctgaagtcttactacgatcgcctttatgagttccagcgtcatacctgtaaagctgccaacctgatccacacccatctgttcatccaagatcgttggaaagaaatggtttatttagcggaagatgcaaagatcagcctggcggatcataaaaagaaggagggtggtgttttgaatacgagccgtatgaacagcacgtaccgccagctgtctgcgcattttctgaaagttctgccgagcaataccatgagcaacctgaaccaagccgtttaccgcacctatcaggcgaaccgtgacctgtattggcgtggtgaaaagtcgctcccaaattatagacgcgacatcccgattccgtttagtagccgtgagatgcgttgggaagaagcgggtgacggcaagaactttttgctgtacctctttcgtattccgttcaaaacttatctgggtcgtgaccgcagcgaactgaaatcgttgctcaaaaaaatcgtgaaaggcgagatcgcgctgcgtcaaagcgcgctgcaaatcaaaaacaacaaaatttatctgttggcgtccgtggaagtcgagaaagctaagcacagcctggataaaaccctgattgcggaagtggcattgtctctggaatatccgctggtcatcaaaatcggtaaggacgagttccagatcggcagcaaagaggagttcttgtaccgccgcttgtccattcaggcggcgcgtcgtagacttcaacaggcctgcgcatatcgctctggtggcaagggtaaggaagaacgttataagtgcctgaaacactataaagagaaggagaagaactacattgaagagaaattacacctgtacagccgtcgtctgattgattactgcgttaaggctggcgcaggcaccattctgttggtaaatcagtcctacaaagaggaactggctaaggaggacccgatgctgttacgtaattggtcctactacggcctgaaagagaagatcgcctacaaggcgaagatggcaggtattcacgtgttggttgagtaaggctccggaagaaggagatatacatatgaatattgaaaatataaacctaataaaattgaagaacggtaatgaagcgggtctgagctacttctatcgtcgtttttttccgtggtatacctttcgtgcgttccgctatatgcgtgacgacctggacgcccaatgtgcagtgcaggaggcgtttctccgtctttggctgaatcgtgctcaagtcgattctgtcgagagcatgcatgagttcctgaagcgccaggtgcaggaagcggcaaaagcattccaccgcaaaaggagcaacgagttcagaaagagcatgctgtattactttgactacgatgacccggatatcctgatcggccatagagccgtggaagaagaggttaccgaagagttacaaccagacgcgagcgatcaggagaaactggactcaattcaccgtttgttaccgcatctgggccgtgagcaagagttgtttatccgcctttgcctgcgttttaatttcaactacgagcgcatcgcgttctacctgggtggtattcgcgactacgaggtggctaataaggtgaacaaatgcattgtacaactgaaaaccctggttgcggattcctccaagttgtctagcgcatccaaaatggaaaccattcgtgttgatgaacgtttgacgccggaacaggcggaagttctcaagctgcgctatgagctgggcgcgtcgttcgatgacattggtcaggctctgcagatgccggtgtcgcgtgttcgtgaaatcttcatccaagccttcaccgtttttaaacacggcaaaaaccacagctacagcaagaacacggtgagctatagtctgtaagtccttaagccaaggagacgtaccatgacaaaaaaaaagactccctttggaaaatacctggagagcaagtctatcaaccaggcggctctggcgcgtaccaccggtattcgtccgaatcgcattagcgagttcgccacccaagattgcctgaaaatgcgcgcagacgagatctacctgttagctaaagcgctgggcgaacgtccgggtacgctgctcgactatttgttggcggaaatcaagtcctaagtcctaaagccaaggagacgtacaatggaacccaagatacacgagggaaaaaatgtgaaacgtttccgcgagatgctgggcattaaacaagaggcgctggcacaggagctgggtgaagactggacccagaagaaagtgtccctgatggaacaaaaggcggtccttgagccggaagttctctacaaagttagcaaggctttgaatataccggacatggcgatcaagaactttgatgaagaaaaggccatcaccattatcgctaataccgttaataacaacgatcatgcgacgggtaatagcctgttcaactatcagccgatctttaacccgattgataaaatcgtgcagttgcacgaagagaagatccagctgtacgaacgtatgctgcgtgagaaagaggacatgattaacaaattggagaagctgctgccacaaaactaataagaattcctgctgccaccgctgagcaataactagcataaccccttggggcctctaaacgggtcttgaggggttttttgctgaaacctcaggcatttgagaagcacacggtcacactgcttccggtagtcaataaaccggtaaaccagcaatagacataagcggctatttaacgaccctgccctgaaccgacgaccgggtcatcgtggccggatcttgcggcccctcggcttgaacgaattgttagacattatttgccgactaccttggtgatctcgcctttcacgtagtggacaaattcttccaactgatctgcgcgcgaggccaagcgatcttcttcttgtccaagataagcctgtctagcttcaagtatgacgggctgatactgggccggcaggcgctccattgcccagtcggcagcgacatccttcggcgcgattttgccggttactgcgctgtaccaaatgcgggacaacgtaagcactacatttcgctcatcgccagcccagtcgggcggcgagttccatagcgttaaggtttcatttagcgcctcaaatagatcctgttcaggaaccggatcaaagagttcctccgccgctggacctaccaaggcaacgctatgttctcttgcttttgtcagcaagatagccagatcaatgtcgatcgtggctggctcgaagatacctgcaagaatgtcattgcgctgccattctccaaattgcagttcgcgcttagctggataacgccacggaatgatgtcgtcgtgcacaacaatggtgacttctacagcgcggagaatctcgctctctccaggggaagccgaagtttccaaaaggtcgttgatcaaagctcgccgcgttgtttcatcaagccttacggtcaccgtaaccagcaaatcaatatcactgtgtggcttcaggccgccatccactgcggagccgtacaaatgtacggccagcaacgtcggttcgagatggcgctcgatgacgccaactacctctgatagttgagtcgatacttcggcgatcaccgcttccctcatactcttcctttttcaatattattgaagcatttatcagggttattgtctcatgagcggatacatatttgaatgtatttagaaaaataaacaaatagctagctcactcggtcgctacgctccgggcgtgagactgcggcgggcgctgcggacacatacaaagttacccacagattccgtggataagcaggggactaacatgtgaggcaaaacagcagggccgcgccggtggcgtttttccataggctccgccctcctgccagagttcacataaacagacgcttttccggtgcatctgtgggagccgtgaggctcaaccatgaatctgacagtacgggcgaaacccgacaggacttaaagatccccaccgtttccggcgggtcgctccctcttgcgctctcctgttccgaccctgccgtttaccggatacctgttccgcctttctcccttacgggaagtgtggcgctttctcatagctcacacactggtatctcggctcggtgtaggtcgttcgctccaagctgggctgtaagcaagaactccccgttcagcccgactgctgcgccttatccggtaactgttcacttgagtccaacccggaaaagcacggtaaaacgccactggcagcagccattggtaactgggagttcgcagaggatttgtttagctaaacacgcggttgctcttgaagtgtgcgccaaagtccggctacactggaaggacagatttggttgctgtgctctgcgaaagccagttaccacggttaagcagttccccaactgacttaaccttcgatcaaaccacctccccaggtggttttttcgtttacagggcaaaagattacgcgcagaaaaaaaggatctcaagaagatcctttgatcttttctactgaaccgctctagatttcagtgcaatttatctcttcaaatgtagcacctgaagtcagccccatacgatataagttgtaattctcatgttagtcatgccccgcgcccaccggaaggagctgactgggttgaaggctctcaagggcatcggtcgagatcccggtgcctaatgagtgagctaacttacattaattgcgttgcgctcactgcccgctttccagtcgggaaacctgtcgtgccagctgcattaatgaatcggccaacgcgcggggagaggcggtttgcgtattgggcgccagggtggtttttcttttcaccagtgagacgggcaacagctgattgcccttcaccgcctggccctgagagagttgcagcaagcggtccacgctggtttgccccagcaggcgaaaatcctgtttgatggtggttaacggcgggatataacatgagctgtcttcggtatcgtcgtatcccactaccgagatgtccgcaccaacgcgcagcccggactcggtaatggcgcgcattgcgcccagcgccatctgatcgttggcaaccagcatcgcagtgggaacgatgccctcattcagcatttgcatggtttgttgaaaaccggacatggcactccagtcgccttcccgttccgctatcggctgaatttgattgcgagtgagatatttatgccagccagccagacgcagacgcgccgagacagaacttaatgggcccgctaacagcgcgatttgctggtgacccaatgcgaccagatgctccacgcccagtcgcgtaccgtcttcatgggagaaaataatactgttgatgggtgtctggtcagagacatcaagaaataacgccggaacattagtgcaggcagcttccacagcaatggcatcctggtcatccagcggatagttaatgatcagcccactgacgcgttgcgcgagaagattgtgcaccgccgctttacaggcttcgacgccgcttcgttctaccatcgacaccaccacgctggcacccagttgatcggcgcgagatttaatcgccgcgacaatttgcgacggcgcgtgcagggccagactggaggtggcaacgccaatcagcaacgactgtttgcccgccagttgttgtgccacgcggttgggaatgtaattcagctccgccatcgccgcttccactttttcccgcgttttcgcagaaacgtggctggcctggttcaccacgcgggaaacggtctgataagagacaccggcatactctgcgacatcgtataacgttactggtttcac

SEQ ID NO: 5973 - DNA, 6099 bp, synthetic construct
  source 1..6099: mol_type = other DNA
attcaccaccctgaattgactctcttccgggcgctatcatgccataccgcgaaaggttttgcgccattcgatggtgtccgggattgacagctagctcagtcctaggtataatgctagcgtggagatatacctcgagctgtcaataaaatatgaggctgcttgtacagccgtagggtgtggccttgttgcctcactgaatatggattgaacctgagatcacatctgtatatacaactagtaccagcgtgatgacgtaaaaataagctttctataagttgtacggttaagttataagcagaacttatagtctcctcgaggcggccgcttatttagttttccgttacgtttttccagacttaaagtacaagtgtttaggcgaactggataaataatttgattttgtttagaaaatctatacattagtaatgttattctaaattagattggatttgcggccgcaataatagactagcataaccccttggggcctctaaacgggtcttgaggggttttttgctgaacgtacgttttacggctagctcagtcctaggtactatgctagcgtggagatatacggtaccaaggaggtaaataatgggagactacaaagaccatgacggtgattataaagatcatgacatcgattacaaggatgacgatgacaagggaggatccggcagcatggctgataatatgtatataacaaggaaaatccaaatcatcgtgaatagtccagataaagacgtggtgtacgacgctatcggtaaacttatgcagtggcagcaggcatgttataagtgcgccaatctgatttacacccatcaattcttgcaggagcagattgcggagatggtttacctggcggatggcgtgaaactgaaaatcagcgatcaccacaaagacgctgacggcatgctggtttccagccgtactaattctacgtacaaagtcctcaccgaaaagtttaagggtgttttaccgtcctccatttataacaacttgaactcgcagctggtaagcaccttcctcaaagagcgtggtttgtatgtcaacggtgaacgctccatccgcaacttcaagcgctcgatcgctatgccgttcagcgcggaaaacattagacgtctgaccgcaggggaccacggtaatttcaccttcatcctgtttggtattccgttccgcacctacttaggccgtggctatgatgaaaagcgcgaactgctccgtcaggttgtgaacggtaagatcaagctggcgtcttcttttctgaaggtcgaacaaaaaaaagtgtttctcctcgcgaccttcgagcaagagaagcagtttcacctgttaggtggtgcaattatcgcggaggcaagcctgagcttggaatatccgctgaccgttaaggttggcaaggcccgtatgaccattggtagcaaagaggagtttctgcatcgtcgtatggcgattcaagccgcccgcagccgtgtgcaggcgagcgttgatggcaacaaagctggccacggcaaggtgcgtaaacgtaagccgctggcgcattatcagagcctggagaaggattacattaagcacaaattgaacgtgtacagcaaacgcctgatcgacttctgcctgcaacatcgcgcagcgacgctgattctgactggtcagcaagaaaaggaagagatcgctatggccgaaccgttcttgctgcgtaactggaattttgccggcctgaaagagatgatcgcgtttaaagcggcgaaagtcggcatcgacctgattgttgaataaggctccggaagaaggagatatacatatggtaggaaaactatgtgaaatatcaagtttcgatgataaagtctttgagaagatcctgaagcagtatcgtttgaccatctactctttcggcaaacgtatgctgaacgacagctacattgttgaaaacattgttcaggatgcgttcttgaagctgtggaattttcgccagacgatcaccagcgacgagcacgcccgtcgtttcctgatgcaaagcgttaagtgggcatgctatagctattttcgcaacagcgactcccgtttccaccgtaacatgatccgtttgaacgactatgacaacccggcggatctgtttggtgaacacccggatgttcaaacctacaatgaccacaccgaagcgctgaatgagagccgcttgaatgaggttaaggaggcgattgacaaagtgtgctacggccgtgaaaaagaggtgatggaactgcattttatcaaaggcctgtcccattcccagatagctgaacgttaccacctctcgattcgtaccgtgaccgttattatcgagaaaggtacagtgcgcctgaagaccatcctcgtgaccgttaagactccggttcatgatattcagttgtctccggcgccaggttttgtagattcgttcaaccatattgaaggtctgaacgaggaacaaaacaaaatctatcacttacgtctgaccggtcgctacgacttcgagcaaatcgccagctttctgcaactgccgctggcgttcgtgcagacggagtatctgaaggcgtggaaaatcgccgcatgtctgaagaaaaaaaatggcaaaccggctggtcgtgctaataagggcattagcggtcgttacggcttactgtctgcataagtccttaagccaaggagacgtaccatgacaaatctaggattgtttttagctaaaaagtccgtgaacaaggcggagatcagccgtaaaacgggtattagcaaaagccgcctgtctgaattaagcatgaacaactcgaccaaactgcgtgcggatgaattgtacctgatcgctctggcaattgacgttgatccgaaagagttgctgaatcacctgttcatggacctcaagctgaaggactaataagaattcctgctgccaccgctgagcaataactagcataaccccttggggcctctaaacgggtcttgaggggttttttgctgaaacctcaggcatttgagaagcacacggtcacactgcttccggtagtcaataaaccggtaaaccagcaatagacataagcggctatttaacgaccctgccctgaaccgacgaccgggtcatcgtggccggatcttgcggcccctcggcttgaacgaattgttagacattatttgccgactaccttggtgatctcgcctttcacgtagtggacaaattcttccaactgatctgcgcgcgaggccaagcgatcttcttcttgtccaagataagcctgtctagcttcaagtatgacgggctgatactgggccggcaggcgctccattgcccagtcggcagcgacatccttcggcgcgattttgccggttactgcgctgtaccaaatgcgggacaacgtaagcactacatttcgctcatcgccagcccagtcgggcggcgagttccatagcgttaaggtttcatttagcgcctcaaatagatcctgttcaggaaccggatcaaagagttcctccgccgctggacctaccaaggcaacgctatgttctcttgcttttgtcagcaagatagccagatcaatgtcgatcgtggctggctcgaagatacctgcaagaatgtcattgcgctgccattctccaaattgcagttcgcgcttagctggataacgccacggaatgatgtcgtcgtgcacaacaatggtgacttctacagcgcggagaatctcgctctctccaggggaagccgaagtttccaaaaggtcgttgatcaaagctcgccgcgttgtttcatcaagccttacggtcaccgtaaccagcaaatcaatatcactgtgtggcttcaggccgccatccactgcggagccgtacaaatgtacggccagcaacgtcggttcgagatggcgctcgatgacgccaactacctctgatagttgagtcgatacttcggcgatcaccgcttccctcatactcttcctttttcaatattattgaagcatttatcagggttattgtctcatgagcggatacatatttgaatgtatttagaaaaataaacaaatagctagctcactcggtcgctacgctccgggcgtgagactgcggcgggcgctgcggacacatacaaagttacccacagattccgtggataagcaggggactaacatgtgaggcaaaacagcagggccgcgccggtggcgtttttccataggctccgccctcctgccagagttcacataaacagacgcttttccggtgcatctgtgggagccgtgaggctcaaccatgaatctgacagtacgggcgaaacccgacaggacttaaagatccccaccgtttccggcgggtcgctccctcttgcgctctcctgttccgaccctgccgtttaccggatacctgttccgcctttctcccttacgggaagtgtggcgctttctcatagctcacacactggtatctcggctcggtgtaggtcgttcgctccaagctgggctgtaagcaagaactccccgttcagcccgactgctgcgccttatccggtaactgttcacttgagtccaacccggaaaagcacggtaaaacgccactggcagcagccattggtaactgggagttcgcagaggatttgtttagctaaacacgcggttgctcttgaagtgtgcgccaaagtccggctacactggaaggacagatttggttgctgtgctctgcgaaagccagttaccacggttaagcagttccccaactgacttaaccttcgatcaaaccacctccccaggtggttttttcgtttacagggcaaaagattacgcgcagaaaaaaaggatctcaagaagatcctttgatcttttctactgaaccgctctagatttcagtgcaatttatctcttcaaatgtagcacctgaagtcagccccatacgatataagttgtaattctcatgttagtcatgccccgcgcccaccggaaggagctgactgggttgaaggctctcaagggcatcggtcgagatcccggtgcctaatgagtgagctaacttacattaattgcgttgcgctcactgcccgctttccagtcgggaaacctgtcgtgccagctgcattaatgaatcggccaacgcgcggggagaggcggtttgcgtattgggcgccagggtggtttttcttttcaccagtgagacgggcaacagctgattgcccttcaccgcctggccctgagagagttgcagcaagcggtccacgctggtttgccccagcaggcgaaaatcctgtttgatggtggttaacggcgggatataacatgagctgtcttcggtatcgtcgtatcccactaccgagatgtccgcaccaacgcgcagcccggactcggtaatggcgcgcattgcgcccagcgccatctgatcgttggcaaccagcatcgcagtgggaacgatgccctcattcagcatttgcatggtttgttgaaaaccggacatggcactccagtcgccttcccgttccgctatcggctgaatttgattgcgagtgagatatttatgccagccagccagacgcagacgcgccgagacagaacttaatgggcccgctaacagcgcgatttgctggtgacccaatgcgaccagatgctccacgcccagtcgcgtaccgtcttcatgggagaaaataatactgttgatgggtgtctggtcagagacatcaagaaataacgccggaacattagtgcaggcagcttccacagcaatggcatcctggtcatccagcggatagttaatgatcagcccactgacgcgttgcgcgagaagattgtgcaccgccgctttacaggcttcgacgccgcttcgttctaccatcgacaccaccacgctggcacccagttgatcggcgcgagatttaatcgccgcgacaatttgcgacggcgcgtgcagggccagactggaggtggcaacgccaatcagcaacgactgtttgcccgccagttgttgtgccacgcggttgggaatgtaattcagctccgccatcgccgcttccactttttcccgcgttttcgcagaaacgtggctggcctggttcaccacgcgggaaacggtctgataagagacaccggcatactctgcgacatcgtataacgttactggtttcac

SEQ ID NO: 5974 - DNA, 6376 bp, synthetic construct
  source 1..6376: mol_type = other DNA
attcaccaccctgaattgactctcttccgggcgctatcatgccataccgcgaaaggttttgcgccattcgatggtgtccgggattgacagctagctcagtcctaggtataatgctagcgtggagatatacctcgagaattaaaaatgagggtgcttgtacacccgtaaggtgaggtctcaatggcactcactaaatgcaggcagcatatacaactgacgttcgcgtttgccgtgttttttaggcattgaggtatgaaggatgaagacaactggaattatgatgaacagaaatatttaggcttggtcattgaaaatcaactcctcgaggcggccgccttagccctttctacacctaagatgagtaaaaaaatcaaaaatattgttggtgtatattacaacaaaaaagaaattatttatatctttatccaacaactacaagtacagccttttacgttaaaccataatttcataattgaatttatcatgtaaaattctttgagatttaaaaccaaacctataagaagaaacaaaccaccgtttaatgaattagccatttagtctaggctagaagccagaaagccttccctcaagcataagcctttccctaagtttaacggctttttcgggaaggcctatggtttcataaactaattaaagacaaccaaaaccacagcaaattatgaaaactatactccacaccgctatactcttactatttattagtacagtacctattcgaaaatcccatccaacattaaaaactgttggctgcggccgcaataatagactagcataaccccttggggcctctaaacgggtcttgaggggttttttgctgaacgtacgttttacggctagctcagtcctaggtactatgctagcgtggagatatacggtaccaaggaggtaaataatgggagactacaaagaccatgacggtgattataaagatcatgacatcgattacaaggatgacgatgacaagggaggatccggcagcatgggaaaagaaacaataaagctaactaggaagatccaattgctggtggacgctccgaataaagaggaacgcaaagaggccctggataccctgtaccgctggcagaaccgcagctaccgcgctggcaatctgattgtcacccaccagtacatccaagagatgattaaggactttttctatctgtctgaaggtattcgttatcgcttggtcgatgaaaagaaagcggaagacggcatcctgaaccgttcgaaatccaactgcacgtaccgtgttgttagcgatcgtttcaaaggtgaggtgccgaccaatatcctggcgaatatgaactacaacatcatgaataacttcagcaaaaacttggttcagtaccgccgtggtgaacgttcactggctaatttccgtcgtgatattccattcccgtttggtacgattggcatccatggtctgtcttataagaaggagaagaaagcgttttgttttcgtttgttttcgatcccgttcaaaacctatctgggtaaggactacaccgataagaggtccttgttggagcaggttgtagctggcaacattaagctgtgtaccagcaaaatccaactgaacaagggtaagatttattggctggcggtgtttgaagtggcgaaagagaagcacaacctgaaaccggaagtcatcgccgaggctagcctctctctggagcatccgattattgttaaaagccggaaggcgactctctccatcgggagccgtgaagaatttctgtaccgtcgtttggcgattcaagcagcactgaaacgtgcacagaacgcaaccgcatattgccgtagcggtaagggccgtaaacgtaagaccaaagccgttgaacgattccacgaaaaggagaagaactacgtgagcaaccgtctacatgtttatagccgcaaactcatcgatttctgcatcaagcacgaggcgggcacgttaatcttattgaaccaggaggacaagatggaaattgcgaaagaggacggcttcgtgctgcgtaattggaattactatgaactgatgaccaaaatcaaatacaaagcggagaaggcgggtattgaactgatcgtggactaaggctccggaagaaggagatatacatatggaaagggagtttaagctattaaaagaaggtcacccggacgctatggagttcatctacgcccgttaccaacacaagttgttttggatgggcaaacaacttatcaaggacgagttcgtgatcgagagcattctccaagataccttcctcaagctgtgggaaaagcgcgatcatattgaggacccgaaacacatgctgtacttcctgctgcatgttatgaagcgcgactgcagctattactacattagaccacgtaacaactttcatcgtaatatcaacagcctggataattatgaaaactaccaagagtatattcacggctatgacccggaatcggaagacgagcacctgaaggaccaggaggctaatcagaaagcgctggaccgtattaagtgcgtgtttccgctgttacgaccggaacgtcgttacctgatcgagttgtgtctgaaatatggtttccagtataaaaacatcgcggaactgatgggcacctctactacgtacacctccaacgaggtgaagcgcgcaattgatgatattaagaagatcatccaccagggtagcaatctgggttccaaaccggatcagattcaggtcaaaaagaacacgcgcatcacccgtgaacaggagaaagttctgcagttgcgcaacgagatgcattatagttttgcggcaatcgccgaggaactgcaattgtctcagaaagaggttcacaaagagttcatgaccgcgtacaaattgctgcaaagcaagcacaaacagcaacaaagcgcgtaagtccttaagccaaggagacgtaccatgcaaaatgaaaaggacaaagtagattttcttatccaatttggcagcaatttcggcaaaatccgtaagatgaagaacttatccttccgcgctctgagccagaaatgcgatttggattacgcggacctgaacaagatcgagaaaggtaagcgtaatattacgctgaccaccattgcagaactggcgcgtggtctgaacgtgcacccgaaagagttgtttgacttcgactttaccccgtaataagaattcctgctgccaccgctgagcaataactagcataaccccttggggcctctaaacgggtcttgaggggttttttgctgaaacctcaggcatttgagaagcacacggtcacactgcttccggtagtcaataaaccggtaaaccagcaatagacataagcggctatttaacgaccctgccctgaaccgacgaccgggtcatcgtggccggatcttgcggcccctcggcttgaacgaattgttagacattatttgccgactaccttggtgatctcgcctttcacgtagtggacaaattcttccaactgatctgcgcgcgaggccaagcgatcttcttcttgtccaagataagcctgtctagcttcaagtatgacgggctgatactgggccggcaggcgctccattgcccagtcggcagcgacatccttcggcgcgattttgccggttactgcgctgtaccaaatgcgggacaacgtaagcactacatttcgctcatcgccagcccagtcgggcggcgagttccatagcgttaaggtttcatttagcgcctcaaatagatcctgttcaggaaccggatcaaagagttcctccgccgctggacctaccaaggcaacgctatgttctcttgcttttgtcagcaagatagccagatcaatgtcgatcgtggctggctcgaagatacctgcaagaatgtcattgcgctgccattctccaaattgcagttcgcgcttagctggataacgccacggaatgatgtcgtcgtgcacaacaatggtgacttctacagcgcggagaatctcgctctctccaggggaagccgaagtttccaaaaggtcgttgatcaaagctcgccgcgttgtttcatcaagccttacggtcaccgtaaccagcaaatcaatatcactgtgtggcttcaggccgccatccactgcggagccgtacaaatgtacggccagcaacgtcggttcgagatggcgctcgatgacgccaactacctctgatagttgagtcgatacttcggcgatcaccgcttccctcatactcttcctttttcaatattattgaagcatttatcagggttattgtctcatgagcggatacatatttgaatgtatttagaaaaataaacaaatagctagctcactcggtcgctacgctccgggcgtgagactgcggcgggcgctgcggacacatacaaagttacccacagattccgtggataagcaggggactaacatgtgaggcaaaacagcagggccgcgccggtggcgtttttccataggctccgccctcctgccagagttcacataaacagacgcttttccggtgcatctgtgggagccgtgaggctcaaccatgaatctgacagtacgggcgaaacccgacaggacttaaagatccccaccgtttccggcgggtcgctccctcttgcgctctcctgttccgaccctgccgtttaccggatacctgttccgcctttctcccttacgggaagtgtggcgctttctcatagctcacacactggtatctcggctcggtgtaggtcgttcgctccaagctgggctgtaagcaagaactccccgttcagcccgactgctgcgccttatccggtaactgttcacttgagtccaacccggaaaagcacggtaaaacgccactggcagcagccattggtaactgggagttcgcagaggatttgtttagctaaacacgcggttgctcttgaagtgtgcgccaaagtccggctacactggaaggacagatttggttgctgtgctctgcgaaagccagttaccacggttaagcagttccccaactgacttaaccttcgatcaaaccacctccccaggtggttttttcgtttacagggcaaaagattacgcgcagaaaaaaaggatctcaagaagatcctttgatcttttctactgaaccgctctagatttcagtgcaatttatctcttcaaatgtagcacctgaagtcagccccatacgatataagttgtaattctcatgttagtcatgccccgcgcccaccggaaggagctgactgggttgaaggctctcaagggcatcggtcgagatcccggtgcctaatgagtgagctaacttacattaattgcgttgcgctcactgcccgctttccagtcgggaaacctgtcgtgccagctgcattaatgaatcggccaacgcgcggggagaggcggtttgcgtattgggcgccagggtggtttttcttttcaccagtgagacgggcaacagctgattgcccttcaccgcctggccctgagagagttgcagcaagcggtccacgctggtttgccccagcaggcgaaaatcctgtttgatggtggttaacggcgggatataacatgagctgtcttcggtatcgtcgtatcccactaccgagatgtccgcaccaacgcgcagcccggactcggtaatggcgcgcattgcgcccagcgccatctgatcgttggcaaccagcatcgcagtgggaacgatgccctcattcagcatttgcatggtttgttgaaaaccggacatggcactccagtcgccttcccgttccgctatcggctgaatttgattgcgagtgagatatttatgccagccagccagacgcagacgcgccgagacagaacttaatgggcccgctaacagcgcgatttgctggtgacccaatgcgaccagatgctccacgcccagtcgcgtaccgtcttcatgggagaaaataatactgttgatgggtgtctggtcagagacatcaagaaataacgccggaacattagtgcaggcagcttccacagcaatggcatcctggtcatccagcggatagttaatgatcagcccactgacgcgttgcgcgagaagattgtgcaccgccgctttacaggcttcgacgccgcttcgttctaccatcgacaccaccacgctggcacccagttgatcggcgcgagatttaatcgccgcgacaatttgcgacggcgcgtgcagggccagactggaggtggcaacgccaatcagcaacgactgtttgcccgccagttgttgtgccacgcggttgggaatgtaattcagctccgccatcgccgcttccactttttcccgcgttttcgcagaaacgtggctggcctggttcaccacgcgggaaacggtctgataagagacaccggcatactctgcgacatcgtataacgttactggtttcac

SEQ ID NO: 5975 - DNA, 6842 bp, synthetic construct
  source 1..6842: mol_type = other DNA
attcaccaccctgaattgactctcttccgggcgctatcatgccataccgcgaaaggttttgcgccattcgatggtgtccgggattgacagctagctcagtcctaggtataatgctagcgtggagatatacctcgagcaattagattttgagggtgcttgtacacccatagggtgaggttaagaattacactcactaagtgtgaacaacacatacaacctattgcctgactgtacccaatagcaatcaataagcctaaatacgggcacctaaatacaatatgggacaaacaccgataaagtttttttgaacgattgaaaatggatacttttaatgaagtgtccagaaatcgtcaaatattagatagaacccttgggatattgcttctccttataggtatcgcaattgggattttccttattcctgattttttaccactacttaaaaggactccttatttattgctcgaacccgatgcaggtgtaagacatgagcttggatacgcttggtttatgcaatcaattggttggatcattgcttttttcgcatttaggagcagtagggcatttttaagggatagcaagaaaccaactagtaccagtaattaaatcaaaggtgaaagaggtatatagttgcctaaacaccatatacaactcactgaaaaaccgctccgaaacgcaatattctgtgatgacagccattcatccggtaggctaaagtatgtaaaaagaagctaatgtcatcttcccttttctcctcgaggcggccgcaaatgaaaaaattacaagaagtttttttgagagcgttcgctctcatttaggggtttttattatatttatccctgaaataacatatttgcgaaacttgttaagttaataatattagaagcattcgctttgattctcgcatcaaaaactggtaatttttaacgacgagatgataagtgcaaatgctcacggcccgggcgtgagcttacttattgtcgtgcggtataccagtaccttgatgctataggttaagttttcacgccctctttatcttatttaaaaagggctttctcaacttttcaaagctatcttctctttatccttttttaagaaatcgcatcagctttaaaagcataatcaattttaaccatggtgcattgaccatcttaaacgaggcctgttgcggccgcaataatagactagcataaccccttggggcctctaaacgggtcttgaggggttttttgctgaacgtacgttttacggctagctcagtcctaggtactatgctagcgtggagatatacggtaccaaggaggtaaataatgggagactacaaagaccatgacggtgattataaagatcatgacatcgattacaaggatgacgatgacaagggaggatccggcagcatgggaaaatcaacactaaagcacactaggaagattcagatcttgatcgacctgccgacgaaagacgagaagaaagaggttatggatatgatgtatcagtggcgtgatcgttgcttccgcgcagcgaacattatcgtgacccatctgtacgttcaggagatgatcaaggacttcttttatctgagcgaaggtattaagtacaaactcgcggatgagaaaaaagacgaaaagggcatcctgcaacgtagccgtatgaacaccacctatcgcgtggtgagcgaccgttttaagggcgagatgccgacgaatatcctttccaccctgaaccacggcctgatcagcagctttaacaaaaaccgcgtccagtattggaaaggcgaacgtagcctgccaaatttcaaaaaggacatggcattcccgtttggtctgcaaggtatctctcgtctggtgtatgatgaagaaaaaaaggcgttctgctttagattgtaccgcgttccgtttaaaacgtacttgggtaaggacttcaccgataaacgcatgctgctggagcgcctagtcaaaggagacgttaagctgtgtgcgtcgaacattcaactgaatggtggtaagatcttttggctggctgtattcgaaattgaaaaggagaagcacagcctcaaaccggaagtgattgccgaagcttcgctctccttggagtatccgattgttgtgaagactggtaagaaccgtctgaccattggtactaaagaagagttcctgtaccgcagattggcgattcaagcggcgcgtcgtcgtacccaggttggtgcaacctacagccgttctggtaagggtaagaagcgcaaattaaaagccgtcgataaataccataaaacggaatcaaactatgtggcgcatcgtattcacgtttacagccgtaagttaatcgatttctgcattaaacaccaagcgggcaccctgatccttatgaatcaggaggacaaagttggcatcgccaaagaggaggagttcgtgctgcgtaattggtcctattacgaactgatgaccaaaatcaagtacaaagctgagaaggctggcatcgaattgattatcggctaaggctccggaagaaggagatatacatatgttatattcagattttgaattgctaaaaattggcgacactagtgcgttggaccatatccatgcaaaatactttcgttccatcctgtggatcggccgtcagtggctgaacgatgattttttgatcgagtctctggttcaggatacgtttctaaagctgtgggttaatagagataagctggaaagcccggaacacattttttacttcttgcgtttcgtgatgaagcgcgagtgcattagctattaccgtaaaccaaaatacaaatttcataaaaaagtgaacagcttggaggattacgacaactatcaggactatatggtgggttatgatccggttaacgactctgagaacctggacgaacaagaaagcacccagaaatccttcgaccacattaaatcgattcttccgctgctgaatgcggataagcgccatctgatcgagttatgtctgaagtacggtttccaatataaggcgatcagcaaagttatgggtaaaggtattcacgaaaccagccgtgaaatcaaagaagccatcgaggacatcaagaccattgtccacaagggcaacgagctcggcagcaatgacaccatgaccaatgaaatcaagtttagcggtgaattatccgaggaacaggctaaggtgctgaagatgcgctgcgatttgaagtacagcttctctgagattgccaaggagctggaactgtccgagaaagaggtacaccaagagttcatgaaggcatataaactgatgaaagcgaaccaccagttgcaactgcaaagcgcgtaagtccttaagccaaggagacgtaccatgctaatggctgataagaacacaaataaatcgaaggtctatttcagcgataaatacgtgtgcaagttcatcagcgaagagtggctgaccagcaaggacacctccgcgcgtaaatacggtaaaatctacggcgtgaactaccatgttattgaaaagatccagcaagagaatggttataacattccgctgagcaccctgtctacgatttgttttaaccacggcatcaaattgtccgacttctttaaattggttgagaagaagtacggtgaatttctgaatgatagctatgagtataaataataagaattcctgctgccaccgctgagcaataactagcataaccccttggggcctctaaacgggtcttgaggggttttttgctgaaacctcaggcatttgagaagcacacggtcacactgcttccggtagtcaataaaccggtaaaccagcaatagacataagcggctatttaacgaccctgccctgaaccgacgaccgggtcatcgtggccggatcttgcggcccctcggcttgaacgaattgttagacattatttgccgactaccttggtgatctcgcctttcacgtagtggacaaattcttccaactgatctgcgcgcgaggccaagcgatcttcttcttgtccaagataagcctgtctagcttcaagtatgacgggctgatactgggccggcaggcgctccattgcccagtcggcagcgacatccttcggcgcgattttgccggttactgcgctgtaccaaatgcgggacaacgtaagcactacatttcgctcatcgccagcccagtcgggcggcgagttccatagcgttaaggtttcatttagcgcctcaaatagatcctgttcaggaaccggatcaaagagttcctccgccgctggacctaccaaggcaacgctatgttctcttgcttttgtcagcaagatagccagatcaatgtcgatcgtggctggctcgaagatacctgcaagaatgtcattgcgctgccattctccaaattgcagttcgcgcttagctggataacgccacggaatgatgtcgtcgtgcacaacaatggtgacttctacagcgcggagaatctcgctctctccaggggaagccgaagtttccaaaaggtcgttgatcaaagctcgccgcgttgtttcatcaagccttacggtcaccgtaaccagcaaatcaatatcactgtgtggcttcaggccgccatccactgcggagccgtacaaatgtacggccagcaacgtcggttcgagatggcgctcgatgacgccaactacctctgatagttgagtcgatacttcggcgatcaccgcttccctcatactcttcctttttcaatattattgaagcatttatcagggttattgtctcatgagcggatacatatttgaatgtatttagaaaaataaacaaatagctagctcactcggtcgctacgctccgggcgtgagactgcggcgggcgctgcggacacatacaaagttacccacagattccgtggataagcaggggactaacatgtgaggcaaaacagcagggccgcgccggtggcgtttttccataggctccgccctcctgccagagttcacataaacagacgcttttccggtgcatctgtgggagccgtgaggctcaaccatgaatctgacagtacgggcgaaacccgacaggacttaaagatccccaccgtttccggcgggtcgctccctcttgcgctctcctgttccgaccctgccgtttaccggatacctgttccgcctttctcccttacgggaagtgtggcgctttctcatagctcacacactggtatctcggctcggtgtaggtcgttcgctccaagctgggctgtaagcaagaactccccgttcagcccgactgctgcgccttatccggtaactgttcacttgagtccaacccggaaaagcacggtaaaacgccactggcagcagccattggtaactgggagttcgcagaggatttgtttagctaaacacgcggttgctcttgaagtgtgcgccaaagtccggctacactggaaggacagatttggttgctgtgctctgcgaaagccagttaccacggttaagcagttccccaactgacttaaccttcgatcaaaccacctccccaggtggttttttcgtttacagggcaaaagattacgcgcagaaaaaaaggatctcaagaagatcctttgatcttttctactgaaccgctctagatttcagtgcaatttatctcttcaaatgtagcacctgaagtcagccccatacgatataagttgtaattctcatgttagtcatgccccgcgcccaccggaaggagctgactgggttgaaggctctcaagggcatcggtcgagatcccggtgcctaatgagtgagctaacttacattaattgcgttgcgctcactgcccgctttccagtcgggaaacctgtcgtgccagctgcattaatgaatcggccaacgcgcggggagaggcggtttgcgtattgggcgccagggtggtttttcttttcaccagtgagacgggcaacagctgattgcccttcaccgcctggccctgagagagttgcagcaagcggtccacgctggtttgccccagcaggcgaaaatcctgtttgatggtggttaacggcgggatataacatgagctgtcttcggtatcgtcgtatcccactaccgagatgtccgcaccaacgcgcagcccggactcggtaatggcgcgcattgcgcccagcgccatctgatcgttggcaaccagcatcgcagtgggaacgatgccctcattcagcatttgcatggtttgttgaaaaccggacatggcactccagtcgccttcccgttccgctatcggctgaatttgattgcgagtgagatatttatgccagccagccagacgcagacgcgccgagacagaacttaatgggcccgctaacagcgcgatttgctggtgacccaatgcgaccagatgctccacgcccagtcgcgtaccgtcttcatgggagaaaataatactgttgatgggtgtctggtcagagacatcaagaaataacgccggaacattagtgcaggcagcttccacagcaatggcatcctggtcatccagcggatagttaatgatcagcccactgacgcgttgcgcgagaagattgtgcaccgccgctttacaggcttcgacgccgcttcgttctaccatcgacaccaccacgctggcacccagttgatcggcgcgagatttaatcgccgcgacaatttgcgacggcgcgtgcagggccagactggaggtggcaacgccaatcagcaacgactgtttgcccgccagttgttgtgccacgcggttgggaatgtaattcagctccgccatcgccgcttccactttttcccgcgttttcgcagaaacgtggctggcctggttcaccacgcgggaaacggtctgataagagacaccggcatactctgcgacatcgtataacgttactggtttcac

SEQ ID NO: 5976 - DNA, 8477 bp, synthetic construct
  source 1..8477: mol_type = other DNA
attcaccaccctgaattgactctcttccgggcgctatcatgccataccgcgaaaggttttgcgccattcgatggtgtccgggatctcgacgctctcccttatgcgactcctgcattaggaaattaatacgactcactataggggaattgtgagcggataacaattcccctgtagaaataattttgtttaactttaataaggagatataccatggctctattaaattttcaaaaacccgataaggtgattatgattgactccaccgacttcgaaggtaaattcgagttccgtccgctggaaccgggttacggcttgacggttggtaatgcgctgcgtcgtgtgctgttgtcttccttggagggctttgcaattacttcagtgagaatcgacggcgttgagcacgagttcagcgtggtgccaggtgttgttgaagatgttaccgaaattatcctcaacctgaagcaggttcgctttaaacgtcaaattgacgacgtggagagcgaaacggtgtctatcagcgtcagtggcaaagaacaactgaccgcgggtgatttccagaagttcatcagcggttaccaggtgctgaacccggatctcgtcatctgcaacatgggtccgaaggtttcgatcaacatggaaatcgttattgaaaaaggccgtggttacgtgccggcagaagagaacaaaaagagcaatgctccgctgggctccatcgccgttgacagcgtctataccccggttaaaaatgttaagtacagcatcgagaactatcgtgttgagcaaaaaaccgattatgaaaaactggtatttgagatcattactgacggtagcattcatccgaaggacgctctgacggaggcggcgaaagtgcttatccaccactttatgttgtttagcgatgagcgcattaccctggaagccgatgaaatagcgcagaccgagacctacgacgaggagagcttacacatgcgtcaactgctgaagaccaaactggtggacatggacctgtccgtgcgcgcattgaattgtctgaaggcggcggaagttgacaccttgggcgatttagtcagctttaacaagaacgatctgatgaaattccgcaatttcggcaagaagtctttgaccgaacttgaggaactggtgattaacaagggtctgcagtttggtatggatctgagcaaatacaaactggataaagactaagtcgaattcccaaggagacgtaccatgtttacaaacactatagaaagggtaaatttcgcgagcgctaagaacattccggagtacccggatttcctggacatccagattaagagcttccaggattttttccaattggaaaccaaaagcgacgaacgggggaacgagggtttgtataataccttcatggaaaactttccgatcacggacacccgtaaccagtttgttttggagttcctggattattttatcgatccaccgcgttattccattcaagagtgcattgaacgtggtctgacgtactccgtcccgctgaaggcgaggctgaaactgtattgtaccgaccccgagcacgaggatttcgagacgatcgtccaggatgtgtatctgggcacgatcccatatatgacccccagcggtacgtttgtcataaacggcgctgaaagagttgttgtttcgcaattgcaccgaagcccgggtgtgttttttggtcagagcttccatgcgaacggtacgaagttatattctgcgcgggttatcccgtttaaaggcagctggattgagttcgccactgacatcaacggtgtgatgtacgcatacattgatcgtaaaaagaaactgccggttacgacgttatttcgtgcgattggttttgagcgtgacaaggatattctggagattttcgatctgtcagaggaggtaaaggtgagcaaggctggcctgaagaaggttctggggagaaagctggcggcacgtgtgttaaatacctggcacgaagacttcgtcgatgaggacactggtgaggtggtgtctatcgaacgcaacgaaatcattttggaccgcgacaccattctggagaaagaacatatcgatgagatcatcgatgctgatgtcaaaaccatcctgctgcataaagaaaataatgcacaatcagattacgcgattatacataataccctgcagaaggacccgaccaactctgagaaagaagctgtggaacacatttaccgtcagctgcgtaatgccgagccgccggatgaagagaccgcacgggggataatcgaaaaactgttcttctccgatcagcgctactctctgggcgaggtgggccgttaccgtatgaacaagaagctcggactcgacatcggtatggataaggaggtcctcaccaaagaggacatcatcacgattatcaagtacctcatcgaactgataaacagcaaagctgagatcgacgacatcgatcatctgagcaatcgtcgtgtgcgtaccgttggcgagcagctctcccaacaattcggcgttggtttggcgcgcatggcacgcaccatacgtgaacgtatgaatgttcgtgacaacgaagtgtttactccgattgacctgatcaatgcgaagaccctgtcgagcgtgattaattccttctttggtacgaaccaactgtctcagttcatggaccaaaccaacccgcttgctgaaattacccataaacgccgcctcagcgccctgggccccggcggtctgtctcgtgagcgcgcgggtttcgaagtgcgcgacgttcactatactcactatggtagattatgcccgatcgagaccccggagggcccaaatattggcttaatcagctccctgagcgtttttgcgaaagttaatagcatgggtttcctggagactccgtaccgcaaggtagttgatggtaaagtggacgttaaagagcacatttacctgagcgcggaagaagaagaaggcatgaagatcgcccaggccaacattccgctcaaggatgatggcactatcgaccgtgaaaaagtaattgcgcgtgatgagggcgattttccggtggtggacccagttgaaatcaactacacggatgtggcaccgaatcaaatcgcctccattagcgccagccttatcccgttcttggagcacgatgatgccaaccgtgcactgatgggcagcaacatgatgcgtcaagctgtgccgcttttgcgtccggagtcgccgatcgttggtacaggtcttgagcgccaggtcgcgaccgacagccgtgttctgatcaacgcggaaggcgatggcgttgtagaatacgtggacgcgcaaaagatcactattaaatacgaccgtactgaagaagaacgtctggtgagcttcgaggaggatagtaagacctacgagttagtgaaatttcgtaaaaccaatcagggcacctcgattaacctgaaaccgattgtgcgcaaaggtgacaaagtgaagaagggccaggttctgtgcgaaggttatgccaccgaaaagggtgaattggcgctgggtaggaacatgaaagtggcgtttatgccgtggaaaggttataacttcgaggacgcaatcgttattagcgaaaaagtggttcgcgaggacatcttcacgagcgtgcacatcgatgagtacgcgctggaagtgcgcgacaccaaattgggcgcggaagagttgaccaatgacatcccgaacgtttccgaggaggctacccgtgatttggacgagtacggcatgattcgcattggcgctgaggttaagccgggcgacatactgattggcaaaatcactccgaaaggcgagagcgacccgaccccggaggagaagctgttgcgcgcgattttcggcgataaggcgggtgacgtcaaggacgcgtccctgaaggcgtccccaagcctgcgcggcgtggtgattgataaaaaactgtttagtcgtagcatcaaagataaacgtaagcgctccgaggacaaggaggcgatttctcgtctggaaatggattatgaagtaaagttccagcaactgaaggacgttctcatcgagaaactgttcggactggttaacggtaaaacgagccaaggcgttattaacgatttgggtgaagaggttcttccgaaaggcaaaaagtacaccatcaagatgcttaacgcggtcgacgatttcgcgcatctggtgggtggctcttggaccaccgacgaagataccaatgcgctggtcgcggatctgctgcacaattataagattaaactcaacgacatccaaggtaacctgcgtcgtgacaaatttaccatcagcgttggcgatgaactgccggcaggtatcatgaagttggctaaggtctatattgcgaaaaaacgtaagctgaaggttggtgacaagatggcgggccgtcatggtaacaagggaattgttgcacgtatcgtgcgtcaagaagacatgccgtttctggaggatggcaccccggttgacatcgtgctcaatcctctgggcgttccgtcccgcatgaacatcggtcaaatttatgaaaccgtcctaggttgggcaggcttgaaacttggccagaaatatggcaccccgatttttgatggtgcgaccctggacgacattaacgaactgaccgataaagcaggcgttccgcgtttcggtcacacctacctgtacgacggtggcaccggtcagcgcttcgaccaggcagcaacagttggagtgatctatatgctgaagttgggccacatggttgacgacaagatgcacgcccgctctatcggtccgtacagcttgatcacccagcagccgctgggcggtaaggcgcagtttggaggtcagcgttttggtgagatggaagtgtgggcgctggaagcatacggtgcaagcgctaccctgcgtgagatcctgaccgtgaagagcgatgatgtgatcggacgtgctaaaacgtatgagtccatcgtgaagggtgagaccatgccggaaccgggtctgcctgagagtttcaacgtcctgatgcatgaactaaagggtctgggtctggacatccgcctggaagagtaataaaagcttgcggccgcataatgcttaagtcgaacagaaagtaatcgtattgtacacggccgcataatcgaaattaatacgactcactataggggaattgtgagcggataacaattccccatcttagtatattagttaagtataagaaggagatatacatatggcagatctcaattggatatcggccggccacgcgatcgctgacgtcggtaccctcgagtctggtaaagaaaccgctgctgcgaaatttgaacgccagcacatggactcgtctactagcgcagcttaattaacctaggctgctgccaccgctgagcaataactagcataaccccttggggcctctaaacgggtcttgaggggttttttgctgaaacctcaggcatttgagaagcacacggtcacactgcttccggtagtcaataaaccggtaaaccagcaatagacataagcggctatttaacgaccctgccctgaaccgacgacaagctgacgaccgggtctccgcaagtggcacttttcggggaaatgtgcgcggaacccctatttgtttatttttctaaatacattcaaatatgtatccgctcatgaattaattcttagaaaaactcatcgagcatcaaatgaaactgcaatttattcatatcaggattatcaataccatatttttgaaaaagccgtttctgtaatgaaggagaaaactcaccgaggcagttccataggatggcaagatcctggtatcggtctgcgattccgactcgtccaacatcaatacaacctattaatttcccctcgtcaaaaataaggttatcaagtgagaaatcaccatgagtgacgactgaatccggtgagaatggcaaaagtttatgcatttctttccagacttgttcaacaggccagccattacgctcgtcatcaaaatcactcgcatcaaccaaaccgttattcattcgtgattgcgcctgagcgagacgaaatacgcggtcgctgttaaaaggacaattacaaacaggaatcgaatgcaaccggcgcaggaacactgccagcgcatcaacaatattttcacctgaatcaggatattcttctaatacctggaatgctgttttcccggggatcgcagtggtgagtaaccatgcatcatcaggagtacggataaaatgcttgatggtcggaagaggcataaattccgtcagccagtttagtctgaccatctcatctgtaacatcattggcaacgctacctttgccatgtttcagaaacaactctggcgcatcgggcttcccatacaatcgatagattgtcgcacctgattgcccgacattatcgcgagcccatttatacccatataaatcagcatccatgttggaatttaatcgcggcctagagcaagacgtttcccgttgaatatggctcatactcttcctttttcaatattattgaagcatttatcagggttattgtctcatgagcggatacatatttgaatgtatttagaaaaataaacaaataggcatgctagcgcagaaacgtcctagaagatgccaggaggatacttagcagagagacaataaggccggagcgaagccgtttttccataggctccgcccccctgacgaacatcacgaaatctgacgctcaaatcagtggtggcgaaacccgacaggactataaagataccaggcgtttccccctgatggctccctcttgcgctctcctgttcccgtcctgcggcgtccgtgttgtggtggaggctttacccaaatcaccacgtcccgttccgtgtagacagttcgctccaagctgggctgtgtgcaagaaccccccgttcagcccgactgctgcgccttatccggtaactatcatcttgagtccaacccggaaagacacgacaaaacgccactggcagcagccattggtaactgagaattagtggatttagatatcgagagtcttgaagtggtggcctaacagaggctacactgaaaggacagtatttggtatctgcgctccactaaagccagttaccaggttaagcagttccccaactgacttaaccttcgatcaaaccgcctccccaggcggttttttcgtttacagagcaggagattacgacgatcgtaaaaggatctcaagaagatcctttacggattcccgacaccatcactctagatttcagtgcaatttatctcttcaaatgtagcacctgaagtcagccccatacgatataagttgtaattctcatgttagtcatgccccgcgcccaccggaaggagctgactgggttgaaggctctcaagggcatcggtcgagatcccggtgcctaatgagtgagctaacttacattaattgcgttgcgctcactgcccgctttccagtcgggaaacctgtcgtgccagctgcattaatgaatcggccaacgcgcggggagaggcggtttgcgtattgggcgccagggtggtttttcttttcaccagtgagacgggcaacagctgattgcccttcaccgcctggccctgagagagttgcagcaagcggtccacgctggtttgccccagcaggcgaaaatcctgtttgatggtggttaacggcgggatataacatgagctgtcttcggtatcgtcgtatcccactaccgagatgtccgcaccaacgcgcagcccggactcggtaatggcgcgcattgcgcccagcgccatctgatcgttggcaaccagcatcgcagtgggaacgatgccctcattcagcatttgcatggtttgttgaaaaccggacatggcactccagtcgccttcccgttccgctatcggctgaatttgattgcgagtgagatatttatgccagccagccagacgcagacgcgccgagacagaacttaatgggcccgctaacagcgcgatttgctggtgacccaatgcgaccagatgctccacgcccagtcgcgtaccgtcttcatgggagaaaataatactgttgatgggtgtctggtcagagacatcaagaaataacgccggaacattagtgcaggcagcttccacagcaatggcatcctggtcatccagcggatagttaatgatcagcccactgacgcgttgcgcgagaagattgtgcaccgccgctttacaggcttcgacgccgcttcgttctaccatcgacaccaccacgctggcacccagttgatcggcgcgagatttaatcgccgcgacaatttgcgacggcgcgtgcagggccagactggaggtggcaacgccaatcagcaacgactgtttgcccgccagttgttgtgccacgcggttgggaatgtaattcagctccgccatcgccgcttccactttttcccgcgttttcgcagaaacgtggctggcctggttcaccacgcgggaaacggtctgataagagacaccggcatactctgcgacatcgtataacgttactggtttcac

SEQ ID NO: 5977 - DNA, 8655 bp, synthetic construct
  source 1..8655: mol_type = other DNA
caggcgtttcccctggcggctccctcgtgcgctctcctgttcctgcctttcggtttaccggtgtcattccgctgttatggccgcgtttgtctcattccacgcctgacactcagttccgggtaggcagttcgctccaagctggactgtatgcacgaaccccccgttcagtccgaccgctgcgccttatccggtaactatcgtcttgagtccaacccggaaagacatgcaaaagcaccactggcagcagccactggtaattgatttagaggagttagtcttgaagtcatgcgccggttaaggctaaactgaaaggacaagttttggtgactgcgctcctccaagccagttacctcggttcaaagagttggtagctcagagaaccttcgaaaaaccgccctgcaaggcggttttttcgttttcagagcaagagattacgcgcagaccaaaacgatctcaagaagatcatcttattaatcagataaaatatttctagatttcagtgcaatttatctcttcaaatgtagcacctgaagtcagccccatacgatataagttgtaattctcatgttagtcatgccccgcgcccaccggaaggagctgactgggttgaaggctctcaagggcatcggtcgagatcccggtgcctaatgagtgagctaacttacattaattgcgttgcgctcactgcccgctttccagtcgggaaacctgtcgtgccagctgcattaatgaatcggccaacgcgcggggagaggcggtttgcgtattgggcgccagggtggtttttcttttcaccagtgagacgggcaacagctgattgcccttcaccgcctggccctgagagagttgcagcaagcggtccacgctggtttgccccagcaggcgaaaatcctgtttgatggtggttaacggcgggatataacatgagctgtcttcggtatcgtcgtatcccactaccgagatgtccgcaccaacgcgcagcccggactcggtaatggcgcgcattgcgcccagcgccatctgatcgttggcaaccagcatcgcagtgggaacgatgccctcattcagcatttgcatggtttgttgaaaaccggacatggcactccagtcgccttcccgttccgctatcggctgaatttgattgcgagtgagatatttatgccagccagccagacgcagacgcgccgagacagaacttaatgggcccgctaacagcgcgatttgctggtgacccaatgcgaccagatgctccacgcccagtcgcgtaccgtcttcatgggagaaaataatactgttgatgggtgtctggtcagagacatcaagaaataacgccggaacattagtgcaggcagcttccacagcaatggcatcctggtcatccagcggatagttaatgatcagcccactgacgcgttgcgcgagaagattgtgcaccgccgctttacaggcttcgacgccgcttcgttctaccatcgacaccaccacgctggcacccagttgatcggcgcgagatttaatcgccgcgacaatttgcgacggcgcgtgcagggccagactggaggtggcaacgccaatcagcaacgactgtttgcccgccagttgttgtgccacgcggttgggaatgtaattcagctccgccatcgccgcttccactttttcccgcgttttcgcagaaacgtggctggcctggttcaccacgcgggaaacggtctgataagagacaccggcatactctgcgacatcgtataacgttactggtttcacattcaccaccctgaattgactctcttccgggcgctatcatgccataccgcgaaaggttttgcgccattcgatggtgtccgggatctcgacgctctcccttatgcgactcctgcattaggaaattaatacgactcactataggggaattgtgagcggataacaattcccctgtagaaataattttgtttaactttaataaggagatataccatgggcagcagccatcaccatcatcaccacagccaggatccgaattcgagctcggcgcgcctgcaggtcgacaagcttgcggccgcataatgcttaagtcgaacagaaagtaatcgtattgtacacggccgcataatcgaaattaatacgactcactataggggaattgtgagcggataacaattccccatcttagtatattagttaagtataagaaggagatatacatatggcaaggataaaagataataacgctcccaagcgcttcaacaaaattagcatcggcttggccagcccggaatccatattagcggagagccgtggcgaggtgctgaaaccggagacgattaactaccgtacccataagccggaacgtgacggccttttctgcgaacgtatctttggtccagttaaggactatgagtgcgcatgcggtaaatataaacgtattagataccgtggtatcgtctgcgatcgttgtggcgttgaggtaactgagaaaaaagtgcgccgtgatcgtgtcggtcacattaacttggtggtgccagtcgcacatatttggtatttccgttccctgcctaataaaatcggctacctgctgggtttgccaagcaagaaattggatatgatcatttattatgagcgctacgtcgtcatccaaccgggcattgcgaagggaccggaaggtgaagaaatccataagctggacttcttgaccgaagaagagtatctgaacattctggaaagcctgccgtccgagaaccaatatctggaagaaaacgacccgaataaattcatcgcgaagatgggtgctgaatgcctgattgacctgttagcgcgtattgatttggagcaactgtcttacgaactgagacacaaagccaatacggagaccagcaagcagcgtaaaaccgaggcgctgaaacgtctccaggttgttgaggcgctgcgtgagagccaggataaccgcgaaaataatccggaatggatgattatgaaggtgatcccggttattccgcctgagctgcgtccgctggtgccgttggacggcggtagattcgccacgagcgatttgaatgacttataccgccgtgttattattcgcaacaaccgcttgaagcgcttaatggaaatcaaggcgccagaggtgattttgcgtaacgagaagcgtatgctccaggaggcggtggactccctgttcgataatacccgtaaggcgagcgcggtgaaaaccgagtccaaccgcccgctgaagagcttgagcgactccctgaagggtaaacaaggtcgtttccgccagaatctgctgggcaaacgcgttgactacagcgctcgcagcgttatcgttgttggccccgagatgaagctgtacgagtgcggtcttccgaaggacatggctgccgaactctacaaaccgtttatcattaggaaattgatcgagcggggcatcgtcaaaaccgttaagtccgcgaaaaagatcatcgataagaaggagccggtggtttgggacatcctagagaatgttctgaagggccacccggttttgttgaaccgcgcaccgactcttcaccgtctgggcatccaggcattccagccgaaactaattgaaggaaaagcgatccgcctgcatccgctggcgtgcaccgcgtttaacgcagactttgatggagaccagatggcagtgcacctgccgctgggtccggaagcgattctggaggctcaattgttgatgctggccagccaaaacatcctgaacccggcgaatggtagcccgattacggtgccttcccaagatatggtgttgggcctgtactacatgaccaaagagaagaggagcacaccggaggaaccggttattggcgagggacttaccttttattctagcgaagaagtggagatcgcctttaatgagcgcaaggtagctctgaacgcgattatcaaagttcgcaccaaagactttaacgaagctggcgaactggtaaacaagatcattgaaaccaccgtcggtcgtgtcctgttcaacaccgtcgtgccggaacaagctggctacattaatactgtgctgaataaaaagtctctgcgtaacatcataggcgacatcctggccgtgaccgatgttccgaccacggctgacttcctggataagatcaagacgatgggttacgagttcgcattcaaaggaggcctcagcttcagcctcggtgacatcattattcccaaggaaaagcacgaaatgattgccgaagcgaacgaacaggttgacgggattatgatgaattataatatgggtttaatcacgttcaacgagcgttacaaccaagttattgatgtttggaccagcaccaatgctatgctgacggagctcgccatgaaacgtattcgtgaagataaacagggttttaactctgtttacatgatgctcgactcaggcgcgcgcggtagcaaagagcaaattcgccagctgaccggtatgcgtggtctgatggcgaaaccaaagaaatccaccgcaggcggtggcgagatcattgagaacccgattttatccaactttaaagaaggcctgtcgatcttggagtatttcatttctacccacggcgcacgtaagggtttggctgatacggcgctcaaaaccgcggatgcgggctacctgacccgtcgtctggtggacgtgagccaggatgtaatcattaataccgaggactgtggtacgttacgcggtatcgaggttgaagcgctgaagaaaaatgaggaggttgtggagaccctcggtgaacgtattttaggtcgcgtgtctctgcacgatgtgtacaatccgctgaccgaggagctgattttgaaggctggtcaggagatcagcgaagcggacgtgaaaaaggttgaggcggcaccgattgagaaggttgaggtccgtagtccgctgacctgtgaagctgctcagggcatctgtgcaaagtgctatggccgtaacctcgctaccaataaaatggtccagcgtggtgaagcggtgggtgtggtggcggcgcaaagcatcggtgaaccaggcacgcaattgaccctgagaacattccatgttggtggtatagctggtaatatcagcgaagatagcaaactggaagcgaaattcgatggcatcgctgaaattgaagacctgcgcgtcgttgagggcgtggacaacggtggcggcaagtccgacatcgttatcagtcgtaccagcgagattaaaatcgtggacgctaagactggtattaccctgagtaccaacaacattccttacggctcacagctgtttgttaagaacggcgaaaaaatcaccaaaggcactgtcatctgccaatgggacccgtacaacggcgttattgtgtctgagttcaccggtcaaattgcgtatgaaaatattgaacagggtatgacctatcaggttgaaatcgatgaacaaacaggttttcaagagaaggtgatcagcgaaagccgcaataagcgcctgattccgaccctgctgattaaagatggtaaaggtgaaactattcgtagctataatctgccggttggcagccatctgatggtggacaacggtgagaagatcaaagagggtaaaatccttgtcaaaatcccgcgcaagagcgcaaaagccggcgacatcaccggtggtctgccgcgtgtcaccgaactgttcgaggctcgtaacccgtctaatccggcagttgtgaccgagatcgacggtgtagtgtccttcggcaaaatcaagcgtggtaatcgtgaaatcatcattgagtcaaaggcaggtgaagtgaaaaaataccttgtgaaactgagcaatcaaatcctcgttcaagagaacgattacgtgcgagctggcatggccctgtccgatggttcgatcacgccggaagacatcctggcgattaagggcccgtctgcggttcagcagtatctggtgaacgaggtgcaagaagtgtatagactccaaggtgtgaagattaacgataaacactttgaagttgtggtacgtcagatgatgagaaaggttcaaatccaggattctggcgacaccacgttccttgagaaccagctggttcacaaagatgattttattaacgaaaacgacgaaatctttggcaaaaaggtcgtagaggacgcgggtgattccgagcgtctgaagccgggccagatcgtgaccgcccgtcagctgcgcgatgagaacagcatcctgcgtcgtgaagacaaaacgttggttaccgcacgcgacgctgttgctgcgacggccaccccgatccttcaaggcatcacccgtgccagcctgcaaacgaagagcttcatctcggctgcgtcctttcaggaaaccacgaaagtgctgaacgaagcagcagttaacgggaaggtagacacgttggagggcctgaaagagaatgttatcgttggtcataagattccggcaggcaccggtatgcgtgattatgactctatcatagttggtagcaaagaggaatacgacgaaatcatggcgcgtaaagaagagttcaaattttaaggcggatccccaaggagacgtaccatgcaagatttaaagaatacaaaagctcccgtgtccaccgcaactttgaatcgtaacgagttcgattcgaagaccggtaatatttatgaggcgatcagcattgcgagcaaacgtgcggtccagatcaacagcgacatcaaaaaggaactgctggagaagttagaggagttcgccacgtacagcgactccctggaggaggtttttgaaaacaaagagcagattgaagtttctaagttttatgagaagctgccgaaaccgcacgcgctggctgtgcaagaatggttggaagataaaatctactaccgcaacaccgaaaaggacgcttaagcagatctcaattggatatcggccggccacgcgatcgctgacgtcggtaccctcgagtctggtaaagaaaccgctgctgcgaaatttgaacgccagcacatggactcgtctactagcgcagcttaattaacctaggctgctgccaccgctgagcaataactagcataaccccttggggcctctaaacgggtcttgaggggttttttgctgaaacctcaggcatttgagaagcacacggtcacactgcttccggtagtcaataaaccggtaaaccagcaatagacataagcggctatttaacgaccctgccctgaaccgacgaccgggtcgaatttgctttcgaatttctgccattcatccgcttattatcacttattcaggcgtagcaccaggcgtttaagggcaccaataactgccttaaaaaaattacgccccgccctgccactcatcgcagtactgttgtaattcattaagcattctgccgacatggaagccatcacagacggcatgatgaacctgaatcgccagcggcatcagcaccttgtcgccttgcgtataatatttgcccatagtgaaaacgggggcgaagaagttgtccatattggccacgtttaaatcaaaactggtgaaactcacccagggattggctgagacgaaaaacatattctcaataaaccctttagggaaataggccaggttttcaccgtaacacgccacatcttgcgaatatatgtgtagaaactgccggaaatcgtcgtggtattcactccagagcgatgaaaacgtttcagtttgctcatggaaaacggtgtaacaagggtgaacactatcccatatcaccagctcaccgtctttcattgccatacggaactccggatgagcattcatcaggcgggcaagaatgtgaataaaggccggataaaacttgtgcttatttttctttacggtctttaaaaaggccgtaatatccagctgaacggtctggttataggtacattgagcaactgactgaaatgcctcaaaatgttctttacgatgccattgggatatatcaacggtggtatatccagtgatttttttctccattttagcttccttagctcctgaaaatctcgataactcaaaaaatacgcccggtagtgatcttatttcattatggtgaaagttggaacctcttacgtgccgatcaacgtctcattttcgccaaaagttggcccagggcttcccggtatcaacagggacaccaggatttatttattctgcgaagtgatcttccgtcacaggtatttattcggcgcaaagtgcgtcgggtgatgctgccaacttactgatttagtgtatgatggtgtttttgaggtgctccagtggcttctgtttctatcagctgtccctcctgttcagctactgacggggtggtgcgtaacggcaaaagcaccgccggacatcagcgctagcggagtgtatactggcttactatgttggcactgatgagggtgtcagtgaagtgcttcatgtggcaggagaaaaaaggctgcaccggtgcgtcagcagaatatgtgatacaggatatattccgcttcctcgctcactgactcgctacgctcggtcgttcgactgcggcgagcggaaatggcttacgaacggggcggagatttcctggaagatgccaggaagatacttaacagggaagtgagagggccgcggcaaagccgtttttccataggctccgcccccctgacaagcatcacgaaatctgacgctcaaatcagtggtggcgaaacccgacaggactataaagatac

SEQ ID NO: 5978 - DNA, 4704 bp, synthetic construct
  source 1..4704: mol_type = other DNA
gaaagaataaaaaaagataaaaagaatagatcccagccctgtgtataactcactactttagtcagttccgcagtattacaaaaggatgtcgcaaacgctgtttgctcctctacaaaacagaccttaaaaccctaaaggcttaagtagcaccctcgcaagctcgggcaaatcgctgaatattccttttgtctccgaccatcaggcacctgagtcgctgtctttttcgtgacattcagttcgctgcgctcacggctctggcagtgaatgggggtaaatggcactacaggcgccttttatggattcatgcaaggaaactacccataatacaagaaaagcccgtcacgggcttctcagggcgttttatggcgggtctgctatgtggtgctatctgactttttgctgttcagcagttcctgccctctgattttccagtctgaccacttcggattatcccgtgacaggtcattcagactggctaatgcacccagtaaggcagcggtatcatcaacaggcttacccgtcttactgtccctagtgcttggattctcaccaataaaaaacgcccggcggcaaccgagcgttctgaacaaatccagatggagttctgaggtcattactggatctatcaacaggagtccaagcgagctctcgaaccccagagtcccgctcagaagaactcgtcaagaaggcgatagaaggcgatgcgctgcgaatcgggagcggcgataccgtaaagcacgaggaagcggtcagcccattcgccgccaagctcttcagcaatatcacgggtagccaacgctatgtcctgatagcggtccgccacacccagccggccacagtcgatgaatccagaaaagcggccattttccaccatgatattcggcaagcaggcatcgccatgggtcacgacgagatcctcgccgtcgggcatgcgcgccttgagcctggcgaacagttcggctggcgcgagcccctgatgctcttcgtccagatcatcctgatcgacaagaccggcttccatccgagtacgtgctcgctcgatgcgatgtttcgcttggtggtcgaatgggcaggtagccggatcaagcgtatgcagccgccgcattgcatcagccatgatggatactttctcggcaggagcaaggtgagatgacaggagatcctgccccggcacttcgcccaatagcagccagtcccttcccgcttcagtgacaacgtcgagcacagctgcgcaaggaacgcccgtcgtggccagccacgatagccgcgctgcctcgtcctgcagttcattcagggcaccggacaggtcggtcttgacaaaaagaaccgggcgcccctgcgctgacagccggaacacggcggcatcagagcagccgattgtctgttgtgcccagtcatagccgaatagcctctccacccaagcggccggagaacctgcgtgcaatccatcttgttcaatcatactcttcctttttcaatattattgaagcatttatcagggttattgtctcatgagcggatacatatttgaatgtatttagaaaaataaacaaataggggttccgcgcacatttccccgaaaagtgccaaaggtataccagtaccactagcgggtaagttgagttttcacgcccaactttttcttagcgtttgatttcttttatttttcggagtgtcgcctaaccctctaggttatgggaaacacttggcaacttttttatgtggggttcactctgtgtgattgtcctgtttttggtacatcacattcggtgttcgatatcctatttaaaaagaagccaaagaatcccgtataatcccaaggctagcgttgtgggatacccgttacactaatttttcggttcacgatatcctttagtcccacaactaacgactacactttttgggtgaccgacccaacacgaaatcatggtctttttttgattaaggaatccatttccacgggcttttgccccttggacaggacggcctttgtccgaaccttgatgcccttctggaagttacggcttttccgtggctttttgggtagtgtgttgaataactaacaaagaaatcaaacgaactcatttttgaattcattaaagaggagaaaggtaccatggcgagtagcgaagacgttatcaaagagttcatgcgtttcaaagttcgtatggaaggttccgttaacggtcacgagttcgaaatcgaaggtgaaggtgaaggtcgtccgtacgaaggtacccagaccgctaaactgaaagttaccaaaggtggtccgctgccgttcgcttgggacatcctgtccccgcagttccagtacggttccaaagcttacgttaaacacccggctgacatcccggactacctgaaactgtccttcccggaaggtttcaaatgggaacgtgttatgaacttcgaagacggtggtgttgttaccgttacccaggactcctccctgcaagacggtgagttcatctacaaagttaaactgcgtggtaccaacttcccgtccgacggtccggttatgcagaaaaaaaccatgggttgggaagcttccaccgaacgtatgtacccggaagacggtgctctgaaaggtgaaatcaaaatgcgtctgaaactgaaagacggtggtcactacgacgctgaagttaaaaccacctacatggctaaaaaaccggttcagctgccgggtgcttacaaaaccgacatcaaactggacatcacctcccacaacgaagactacaccatcgttgaacagtacgaacgtgctgaaggtcgtcactccaccggtgcttaaggatccaaactcgagtaaggatctccaggcatcaaataaaacgaaaggctcagtcgaaagactgggcctttcgttttatctgttgtttgtcggtgaacgctctctactagagtcacactggctcaccttcgggtgggcctttctgcgtttatacctagggtacgggttttgctgcccgcaaacgggctgttctggtgttgactagcctgacgtctaagaaaccattattatcatgacattaacctataaaaataggcgtatcacgaggcagaatttcagataaaaaaaatccttagctttcgctaaggatgatttctggaattctaaagatctttgacagctagctcagtcctaggtataatactagctgagaccagtgactactggtctcagttttagagctagaaatagcaagttaaaataaggctagtccgttatcaacttgaaaaagtggcaccgagtcggtgctttttttataaaacgaaaggctcagtcgaaagactgggcctttcgttttatccgaatacgggttcttgcatgttacattgtcgatctgttcatggtgaacagctttaaatgcaccaaaaactcgtaaaagctctgatgtatctatcttttttacaccgttttcatctgtgcatatggacagttttccctttgatatctaacggtgaacagttgttctacttttgtttgttagtcttgatgcttcactgatagatacaagagccataagaacctcagatccttccgtatttagccagtatgttctctagtgtggttcgttgtttttgcgtgagccatgagaacgaaccattgagatcatgcttactttgcatgtcactcaaaaattttgcctcaaaactggtgagctgaatttttgcagttaaagcatcgtgtagtgtttttcttagtccgttacgtaggtaggaatctgatgtaatggttgttggtattttgtcaccattcatttttatctggttgttctcaagttcggttacgagatccatttgtctatctagttcaacttggaaaatcaacgtatcagtcgggcggcctcgcttatcaaccaccaatttcatattgctgtaagtgtttaaatctttacttattggtttcaaaacccattggttaagccttttaaactcatggtagttattttcaagcattaacatgaacttaaattcatcaaggctaatctctatatttgccttgtgagttttcttttgtgttagttcttttaataaccactcataaatcctcatagagtatttgttttcaaaagacttaacatgttccagattatattttatgaatttttttaactggaaaagataaggcaatatctcttcactaaaaactaattctaatttttcgcttgagaacttggcatagtttgtccactggaaaatctcaaagcctttaaccaaaggattcctgatttccacagttctcgtcatcagctctctggttgctttagctaatacaccataagcattttccctactgatgttcatcatctgagcgtattggttataagtgaacgataccgtccgttctttccttgtagggttttcaatcgtggggttgagtagtgccacacagcataaaattagcttggtttcatgctccgttaagtcatagcgactaatcgctagttcatttgctttgaaaacaactaattcagacatacatctcaattggtctaggtgattttaatcactataccaattgagatgggctagtcaatgataattactagtccttttcccgggagatctgggtatctgtaaattctgctagacctttgctggaaaacttgtaaattctgctagaccctctgtaaattccgctagacctttgtgtgttttttttgtttatattcaagtggttataatttatagaataaa

SEQ ID NO: 5979 - DNA, 4096 bp, synthetic construct
  source 1..4096: mol_type = other DNA
actagaagaacagtatttggtatctgcgctctgctgaagccagttaccttcggaaaaagagttggtagctcttgatccggcaaacaaaccaccgctggtagcggtggtttttttgtttgcaagcagcagattacgcgcagaaaaaaaggatctcaagaagatcctttgatcttttctacggggtctgacgctcagtggaacgaaaactcacgttaagggattttggtcatgagattatcaaaaaggatcttcacctagatccttttaaattaaaaatgaagttttaaatcaatctaaagtatatatgagtaaacttggtctgacagttaccaatgcttaatcagtgaggcacctatctcagcgatctgtctatttcgttcatccatagttgcctgactccccgtcgtgtagataactacgatacgggagggcttaccatctggccccagtgctgcaatgataccgcgagacccacgctcaccggctccagatttatcagcaataaaccagccagccggaagggccgagcgcagaagtggtcctgcaactttatccgcctccatccagtctattaattgttgccgggaagctagagtaagtagttcgccagttaatagtttgcgcaacgttgttgccattgctacaggcatcgtggtgtcacgctcgtcgtttggtatggcttcattcagctccggttcccaacgatcaaggcgagttacatgatcccccatgttgtgcaaaaaagcggttagctccttcggtcctccgatcgttgtcagaagtaagttggccgcagtgttatcactcatggttatggcagcactgcataattctcttactgtcatgccatccgtaagatgcttttctgtgactggtgagtactcaaccaagtcattctgagaatagtgtatgcggcgaccgagttgctcttgcccggcgtcaatacgggataataccgcgccacatagcagaactttaaaagtgctcatcattggaaaacgttcttcggggcgaaaactctcaaggatcttaccgctgttgagatccagttcgatgtaacccactcgtgcacccaactgatcttcagcatcttttactttcaccagcgtttctgggtgagcaaaaacaggaaggcaaaatgccgcaaaaaagggaataagggcgacacggaaatgttgaatactcatactcttcctttttcaatattattgaagcatttatcagggttattgtctcatgagcggatacatatttgaatgtatttagaaaaataaacaaataggggttccgcgcacatttccccgaaaagtgccaaaggtataccagtaccactagcgggtaagttgagttttcacgcccaactttttcttagcgtttgatttcttttatttttcggagtgtcgcctaaccctctaggttatgggaaacacttggcaacttttttatgtggggttcactctgtgtgattgtcctgtttttggtacatcacattcggtgttcgatatcctatttaaaaagaagccaaagaatcccgtataatcccaaggctagcgttgtgggatacccgttacactaatttttcggttcacgatatcctttagtcccacaactaacgactacactttttgggtgaccgacccaacacgaaatcatggtctttttttgattaaggaatccatttccacgggcttttgccccttggacaggacggcctttgtccgaaccttgatgcccttctggaagttacggcttttccgtggctttttgggtagtgtgttgaataactaacaaagaaatcaaacgaactcatttttgaattcattaaagaggagaaaggtaccatggcgagtagcgaagacgttatcaaagagttcatgcgtttcaaagttcgtatggaaggttccgttaacggtcacgagttcgaaatcgaaggtgaaggtgaaggtcgtccgtacgaaggtacccagaccgctaaactgaaagttaccaaaggtggtccgctgccgttcgcttgggacatcctgtccccgcagttccagtacggttccaaagcttacgttaaacacccggctgacatcccggactacctgaaactgtccttcccggaaggtttcaaatgggaacgtgttatgaacttcgaagacggtggtgttgttaccgttacccaggactcctccctgcaagacggtgagttcatctacaaagttaaactgcgtggtaccaacttcccgtccgacggtccggttatgcagaaaaaaaccatgggttgggaagcttccaccgaacgtatgtacccggaagacggtgctctgaaaggtgaaatcaaaatgcgtctgaaactgaaagacggtggtcactacgacgctgaagttaaaaccacctacatggctaaaaaaccggttcagctgccgggtgcttacaaaaccgacatcaaactggacatcacctcccacaacgaagactacaccatcgttgaacagtacgaacgtgctgaaggtcgtcactccaccggtgcttaaggatccaaactcgagtaaggatctccaggcatcaaataaaacgaaaggctcagtcgaaagactgggcctttcgttttatctgttgtttgtcggtgaacgctctctactagagtcacactggctcaccttcgggtgggcctttctgcgtttatacctagggtacgggttttgctgcccgcaaacgggctgttctggtgttgactagcctgacgtctaagaaaccattattatcatgacattaacctataaaaataggcgtatcacgaggccctttcgtctcgcgcgtttcggtgatgacggtgaaaacctctgacacatgcagctcccggagacggtcacagcttgtctgtaagcggatgccgggagcagacaagcccgtcagggcgcgtcagcgggtgttggcgggtgtcggggctggcttaactatgcggcatcagagcagattgtactgagagtgcaccatatgcggtgtgaaataccgcacagatgcgtaaggagaaaataccgcatcaggcgccattcgccattcaggctgcgcaactgttgggaagggcgatcggtgcgggcctcttcgctattacgccagctggcgaaagggggatgtgctgcaaggcgattaagttgggtaacgccagggttttcccagtcacgacgttgtaaaacgacggccagtgaattcgagctcggtacccggggatcctctagagtcgacctgcaggcatgcaagcttggcgtaatcatggtcatagctgtttcctgtgtgaaattgttatccgctcacaattccacacaacatacgagccggaagcataaagtgtaaagcctggggtgcctaatgagtgagctaactcacattaattgcgttgcgctcactgcccgctttccagtcgggaaacctgtcgtgccagctgcattaatgaatcggccaacgcgcggggagaggcggtttgcgtattgggcgctcttccgcttcctcgctcactgactcgctgcgctcggtcgttcggctgcggcgagcggtatcagctcactcaaaggcggtaatacggttatccacagaatcaggggataacgcaggaaagaacatgtgagcaaaaggccagcaaaaggccaggaaccgtaaaaaggccgcgttgctggcgtttttccataggctccgcccccctgacgagcatcacaaaaatcgacgctcaagtcagaggtggcgaaacccgacaggactataaagataccaggcgtttccccctggaagctccctcgtgcgctctcctgttccgaccctgccgcttaccggatacctgtccgcctttctcccttcgggaagcgtggcgctttctcatagctcacgctgtaggtatctcagttcggtgtaggtcgttcgctccaagctgggctgtgtgcacgaaccccccgttcagcccgaccgctgcgccttatccggtaactatcgtcttgagtccaacccggtaagacacgacttatcgccactggcagcagccactggtaacaggattagcagagcgaggtatgtaggcggtgctacagagttcttgaagtggtggcctaactacggctac

SEQ ID NO: 5980 - DNA, 5569 bp, synthetic construct
  source 1..5569: mol_type = other DNA
attcaccaccctgaattgactctcttccgggcgctatcatgccataccgcgaaaggttttgcgccattcgatggtgtccgggattgacagctagctcagtcctaggtataatgctagcgtggagatatacctcgaggtgcggcgcggttcatgaccgtgaggtcaacgcggcaaaaaacatcaaagcccgtgggctggaacagttttttgatttacaggggcaggacaggagcgcctgaccctttccaggcgtcctgtgctccgccttgacaatatgccggccgggacaccggtgaacgcccatgattccggctggagagcgtggatggaacgccggtggggagcctccgcccttccatccacattctccggaccgccgagtgggaaacgagaggccgcatccgtgcggctgaagcctgtaagcaggcgtccacaatattatgacgatgtttttgcacgcggcgcatggatgcgcgccgctggccacaggaaggagatcccccctcctcgaggcggccgcaataatagactagcataaccccttggggcctctaaacgggtcttgaggggttttttgctgaacgtacgttttacggctagctcagtcctaggtactatgctagcgtggagatatacggtaccaaggaggtaaataatgggagactacaaagaccatgacggtgattataaagatcatgacatcgattacaaggatgacgatgacaagggaggatccggcagcatggcttcaagggaaaaacaatataatgtactgaagttacgtctgtacccgacgtcggaacaagctgaactgttcgaaaagacctttggctgctgccgttacctgtggaatcagatgttggctgaccagcagcgtttttatttggagacaggtgtgcacttcatcccgactccggcaaaatacaagaaaggcgcgccatttctgaaggaagtggacaaccaagcgctgatccaagagcacaaccagctgagccgtgcgttccgcctcttcttccaaaacccggaggcgttcggccatccgaattttaagcgtaaaaaggacgaccgcgacagcttcaccgcatgtaatcatgttttcaccagcggtccgacgatttataccacccgcgatggtattcggatgacgaaagctggtatgattcgtgccgtgttcccgcgtcgccctcagaacggttggaaattgaagcgtgttaccgtggaaaaggctcgcaccggccgttactatgcgtatgtgctctacgagtctctggtccagccgcctgaaccggtcctgccggtgccggaacgtaccctgggcctgaagtacagcctgcgtcatttctacgtggacgatcaaggtaatcgtgcggacccgccgcgttggctgaaacaaagccaagagaagctggttcatcttcagcgccgtttgaatcgtatgcagccaggtagcaaaaactatgaagaggcggtcctcaagtaccgcttgctgcacgaacacatcgccaaccagcgccgtgactttctgcacaaagagagccgtcgcatcgcgaacgcttgggatgcggtgtgtgttcgcggtgatgacctgggcgctatgaccgataccttgatccaagcgggctccaccgttaaagaagccggctttggtatgtttcgtgaaatgctgtgttataaattagcgcgccagggcaaagcgtttatccaggttgatcgttacctgccgactacgagatcctgcagcgcctgcggtttgacccgtgacgccctgcatgcacgagactatcgtcgttccggctgggtgtgcccggagtgcggtgcggtacacgatcgcgaggtgaacgcggcaaagaacattaaagcgagaggcctggagcagtttttcgatctgcaaggtcaggatcgctctgcgtaaggccttaagagaaggagatatacatatgttacaattgtcactaaggcccggagaatacctgaccatccacggcgacatcgtggtgcagttggctcaattaagcggcagccgtgcgtttctgcgcgtggaagctgatcgttcgatcccgattgttcgcggtaaagttctggagcgctccggtgcaccgagaccagagtgcctggcgagcctgccgcgttctcgtgcgcgtaagggtcgtgatgctgtttatcattggagcgcagaacgcgaacgtgcggtgcgtaccatggaacagttgttggagcgcatggaagccggtgacagccgtgaagaggcgcaagcgctgcgtgcccaactggagcacctgctgccgaccgtttgggaagaggagctgtctggccagattcaggcgcttttccgctccaagaccgcacaggacgtctaataagaattcctgctgccaccgctgagcaataactagcataaccccttggggcctctaaacgggtcttgaggggttttttgctgaaacctcaggcatttgagaagcacacggtcacactgcttccggtagtcaataaaccggtaaaccagcaatagacataagcggctatttaacgaccctgccctgaaccgacgaccgggtcatcgtggccggatcttgcggcccctcggcttgaacgaattgttagacattatttgccgactaccttggtgatctcgcctttcacgtagtggacaaattcttccaactgatctgcgcgcgaggccaagcgatcttcttcttgtccaagataagcctgtctagcttcaagtatgacgggctgatactgggccggcaggcgctccattgcccagtcggcagcgacatccttcggcgcgattttgccggttactgcgctgtaccaaatgcgggacaacgtaagcactacatttcgctcatcgccagcccagtcgggcggcgagttccatagcgttaaggtttcatttagcgcctcaaatagatcctgttcaggaaccggatcaaagagttcctccgccgctggacctaccaaggcaacgctatgttctcttgcttttgtcagcaagatagccagatcaatgtcgatcgtggctggctcgaagatacctgcaagaatgtcattgcgctgccattctccaaattgcagttcgcgcttagctggataacgccacggaatgatgtcgtcgtgcacaacaatggtgacttctacagcgcggagaatctcgctctctccaggggaagccgaagtttccaaaaggtcgttgatcaaagctcgccgcgttgtttcatcaagccttacggtcaccgtaaccagcaaatcaatatcactgtgtggcttcaggccgccatccactgcggagccgtacaaatgtacggccagcaacgtcggttcgagatggcgctcgatgacgccaactacctctgatagttgagtcgatacttcggcgatcaccgcttccctcatactcttcctttttcaatattattgaagcatttatcagggttattgtctcatgagcggatacatatttgaatgtatttagaaaaataaacaaatagctagctcactcggtcgctacgctccgggcgtgagactgcggcgggcgctgcggacacatacaaagttacccacagattccgtggataagcaggggactaacatgtgaggcaaaacagcagggccgcgccggtggcgtttttccataggctccgccctcctgccagagttcacataaacagacgcttttccggtgcatctgtgggagccgtgaggctcaaccatgaatctgacagtacgggcgaaacccgacaggacttaaagatccccaccgtttccggcgggtcgctccctcttgcgctctcctgttccgaccctgccgtttaccggatacctgttccgcctttctcccttacgggaagtgtggcgctttctcatagctcacacactggtatctcggctcggtgtaggtcgttcgctccaagctgggctgtaagcaagaactccccgttcagcccgactgctgcgccttatccggtaactgttcacttgagtccaacccggaaaagcacggtaaaacgccactggcagcagccattggtaactgggagttcgcagaggatttgtttagctaaacacgcggttgctcttgaagtgtgcgccaaagtccggctacactggaaggacagatttggttgctgtgctctgcgaaagccagttaccacggttaagcagttccccaactgacttaaccttcgatcaaaccacctccccaggtggttttttcgtttacagggcaaaagattacgcgcagaaaaaaaggatctcaagaagatcctttgatcttttctactgaaccgctctagatttcagtgcaatttatctcttcaaatgtagcacctgaagtcagccccatacgatataagttgtaattctcatgttagtcatgccccgcgcccaccggaaggagctgactgggttgaaggctctcaagggcatcggtcgagatcccggtgcctaatgagtgagctaacttacattaattgcgttgcgctcactgcccgctttccagtcgggaaacctgtcgtgccagctgcattaatgaatcggccaacgcgcggggagaggcggtttgcgtattgggcgccagggtggtttttcttttcaccagtgagacgggcaacagctgattgcccttcaccgcctggccctgagagagttgcagcaagcggtccacgctggtttgccccagcaggcgaaaatcctgtttgatggtggttaacggcgggatataacatgagctgtcttcggtatcgtcgtatcccactaccgagatgtccgcaccaacgcgcagcccggactcggtaatggcgcgcattgcgcccagcgccatctgatcgttggcaaccagcatcgcagtgggaacgatgccctcattcagcatttgcatggtttgttgaaaaccggacatggcactccagtcgccttcccgttccgctatcggctgaatttgattgcgagtgagatatttatgccagccagccagacgcagacgcgccgagacagaacttaatgggcccgctaacagcgcgatttgctggtgacccaatgcgaccagatgctccacgcccagtcgcgtaccgtcttcatgggagaaaataatactgttgatgggtgtctggtcagagacatcaagaaataacgccggaacattagtgcaggcagcttccacagcaatggcatcctggtcatccagcggatagttaatgatcagcccactgacgcgttgcgcgagaagattgtgcaccgccgctttacaggcttcgacgccgcttcgttctaccatcgacaccaccacgctggcacccagttgatcggcgcgagatttaatcgccgcgacaatttgcgacggcgcgtgcagggccagactggaggtggcaacgccaatcagcaacgactgtttgcccgccagttgttgtgccacgcggttgggaatgtaattcagctccgccatcgccgcttccactttttcccgcgttttcgcagaaacgtggctggcctggttcaccacgcgggaaacggtctgataagagacaccggcatactctgcgacatcgtataacgttactggtttcac

SEQ ID NO: 5981 - DNA, 5543 bp, synthetic construct
  source 1..5543: mol_type = other DNA
attcaccaccctgaattgactctcttccgggcgctatcatgccataccgcgaaaggttttgcgccattcgatggtgtccgggattgacagctagctcagtcctaggtataatgctagcgtggagatatacctcgagatgcggcgcggtcctgaaacgggaggcaaatgccgccaggaacatcaaggaccaggggctggcccaatatttcagtacgcgggagcggcgcgaaagcgcgtgaagctctttgtattgtctcagctataccggtcggaacgccggagaaggcccatgcttgcgggaaacgttgagcgaagcacaattgaaaaagttgcgtttcgttcagcgtttccataaccaggatgttgggaaacgagaagatgtgttcgcacatccaaagccctgcggggcgttccaaacattatgacgatgaaagatcgtcgatgccgtgaagcgcggcttgaagggcggacggaaggatgatcgtgccgccagacaaaaaaggaggaatcctcctcctcgaggcggccgcaataatagactagcataaccccttggggcctctaaacgggtcttgaggggttttttgctgaacgtacgttttacggctagctcagtcctaggtactatgctagcgtggagatatacggtaccaaggaggtaaataatgggagactacaaagaccatgacggtgattataaagatcatgacatcgattacaaggatgacgatgacaagggaggatccggcagcatggcagctaaaaggtcaaagagtgaaacattgcgctacaccaccctgaaggtgcgtttgtacccaagcgctgaacaggcggcgctgtttgaaaagacctttgggtgctgccgttacatctggaatcaaatgttggcggaccagcagcgtttttacatcgaaacggataaattcttcatcccgacaccggctaagtataaagcaggcgccccgtttttgaaggaggtcgacaaccaggcgttaattcaagagcacaataaactgggtcaggcgtttcgcgtttttttcaagtcaccggagaacttcggctacccgaaattcaaacgtaagaaggacgaccgtgacagctttaccgtttgtaatcatgttatgggtaattccgaaacggtgtataccactcgtgatggcctgcgtatgaccaaagcgggtattgtgcgggcaaagttcccgcgtcgtccgcaaggttggtggaaactgaagcgcgtgaccgtggatcgtacccgtagtggtaaatactatggttatatcctgtatgaatgcccggaaaagaagccggaggtggttgtaccgaccccggagactacggtgggtctgaagtacagcatggcgcgtttttatgttgctgataccggcgaaaccgcagacccgccgcattggctgaagcagagccaggagaagctcgctcgcattcaacaacgcctgaaccgcatgcgtccgggttcgaaaaactatcaggaaaccgtccagaaataccgtttgctccacgaacacattgcgaaccaacgtcgtgacttcatacataaggaaagccgtagaatcgccaacgcctgggatgccgtgtgcgttagaggtgatgatatggaacaaatctcccgcattaccaaccgtggcaacgcactggaagcaggttttggcatgttccgcgagtgcctgcgttacaaactggcccgccagggcaaagagctgctggttgtcgaccgttacttcccatccacccgcacgtgcagcgcgtgtggcagagtgatgccggaagagatcagcatgaaaaggcgcacctggacctgcccacaatgtggcgcagttctgaaacgtgaggcgaacgcggcgcgcaatattaaagaccaaggactggcgcagtatttctctacgcgtgagcgcagagagtctgcgtaaggccttaagagaaggagatatacatatgttatgtttgaatctaacacccggagaatacatgacgatcggcgactcggtcgtggtgcaattggaccgtattagcggtgaccgctgcaagctgatgattgatgcgccacgtgagatcccggtattgagaggcgaggttctggaacgcaccggcggtgagcgcccttcttgtgttgtggaaggtccgcgttggcatcgtcgcgagatcccgtggaatcgtagcaaggcgcaggcgctcgcggcaatgcgtatgctgctgagcgaaatggatggccgtgattccaacgttcaagccctgcgccgtcagctggaccacatgttcccgccggaaccgggtcgtgagaaaaccgaattaccggcacgtgctagcaacaactaataagaattcctgctgccaccgctgagcaataactagcataaccccttggggcctctaaacgggtcttgaggggttttttgctgaaacctcaggcatttgagaagcacacggtcacactgcttccggtagtcaataaaccggtaaaccagcaatagacataagcggctatttaacgaccctgccctgaaccgacgaccgggtcatcgtggccggatcttgcggcccctcggcttgaacgaattgttagacattatttgccgactaccttggtgatctcgcctttcacgtagtggacaaattcttccaactgatctgcgcgcgaggccaagcgatcttcttcttgtccaagataagcctgtctagcttcaagtatgacgggctgatactgggccggcaggcgctccattgcccagtcggcagcgacatccttcggcgcgattttgccggttactgcgctgtaccaaatgcgggacaacgtaagcactacatttcgctcatcgccagcccagtcgggcggcgagttccatagcgttaaggtttcatttagcgcctcaaatagatcctgttcaggaaccggatcaaagagttcctccgccgctggacctaccaaggcaacgctatgttctcttgcttttgtcagcaagatagccagatcaatgtcgatcgtggctggctcgaagatacctgcaagaatgtcattgcgctgccattctccaaattgcagttcgcgcttagctggataacgccacggaatgatgtcgtcgtgcacaacaatggtgacttctacagcgcggagaatctcgctctctccaggggaagccgaagtttccaaaaggtcgttgatcaaagctcgccgcgttgtttcatcaagccttacggtcaccgtaaccagcaaatcaatatcactgtgtggcttcaggccgccatccactgcggagccgtacaaatgtacggccagcaacgtcggttcgagatggcgctcgatgacgccaactacctctgatagttgagtcgatacttcggcgatcaccgcttccctcatactcttcctttttcaatattattgaagcatttatcagggttattgtctcatgagcggatacatatttgaatgtatttagaaaaataaacaaatagctagctcactcggtcgctacgctccgggcgtgagactgcggcgggcgctgcggacacatacaaagttacccacagattccgtggataagcaggggactaacatgtgaggcaaaacagcagggccgcgccggtggcgtttttccataggctccgccctcctgccagagttcacataaacagacgcttttccggtgcatctgtgggagccgtgaggctcaaccatgaatctgacagtacgggcgaaacccgacaggacttaaagatccccaccgtttccggcgggtcgctccctcttgcgctctcctgttccgaccctgccgtttaccggatacctgttccgcctttctcccttacgggaagtgtggcgctttctcatagctcacacactggtatctcggctcggtgtaggtcgttcgctccaagctgggctgtaagcaagaactccccgttcagcccgactgctgcgccttatccggtaactgttcacttgagtccaacccggaaaagcacggtaaaacgccactggcagcagccattggtaactgggagttcgcagaggatttgtttagctaaacacgcggttgctcttgaagtgtgcgccaaagtccggctacactggaaggacagatttggttgctgtgctctgcgaaagccagttaccacggttaagcagttccccaactgacttaaccttcgatcaaaccacctccccaggtggttttttcgtttacagggcaaaagattacgcgcagaaaaaaaggatctcaagaagatcctttgatcttttctactgaaccgctctagatttcagtgcaatttatctcttcaaatgtagcacctgaagtcagccccatacgatataagttgtaattctcatgttagtcatgccccgcgcccaccggaaggagctgactgggttgaaggctctcaagggcatcggtcgagatcccggtgcctaatgagtgagctaacttacattaattgcgttgcgctcactgcccgctttccagtcgggaaacctgtcgtgccagctgcattaatgaatcggccaacgcgcggggagaggcggtttgcgtattgggcgccagggtggtttttcttttcaccagtgagacgggcaacagctgattgcccttcaccgcctggccctgagagagttgcagcaagcggtccacgctggtttgccccagcaggcgaaaatcctgtttgatggtggttaacggcgggatataacatgagctgtcttcggtatcgtcgtatcccactaccgagatgtccgcaccaacgcgcagcccggactcggtaatggcgcgcattgcgcccagcgccatctgatcgttggcaaccagcatcgcagtgggaacgatgccctcattcagcatttgcatggtttgttgaaaaccggacatggcactccagtcgccttcccgttccgctatcggctgaatttgattgcgagtgagatatttatgccagccagccagacgcagacgcgccgagacagaacttaatgggcccgctaacagcgcgatttgctggtgacccaatgcgaccagatgctccacgcccagtcgcgtaccgtcttcatgggagaaaataatactgttgatgggtgtctggtcagagacatcaagaaataacgccggaacattagtgcaggcagcttccacagcaatggcatcctggtcatccagcggatagttaatgatcagcccactgacgcgttgcgcgagaagattgtgcaccgccgctttacaggcttcgacgccgcttcgttctaccatcgacaccaccacgctggcacccagttgatcggcgcgagatttaatcgccgcgacaatttgcgacggcgcgtgcagggccagactggaggtggcaacgccaatcagcaacgactgtttgcccgccagttgttgtgccacgcggttgggaatgtaattcagctccgccatcgccgcttccactttttcccgcgttttcgcagaaacgtggctggcctggttcaccacgcgggaaacggtctgataagagacaccggcatactctgcgacatcgtataacgttactggtttcac

SEQ ID NO: 5982 - DNA, 5581 bp, synthetic construct
  source 1..5581: mol_type = other DNA
attcaccaccctgaattgactctcttccgggcgctatcatgccataccgcgaaaggttttgcgccattcgatggtgtccgggattgacagctagctcagtcctaggtataatgctagcgtggagatatacctcgagctgcccaaagtgcgggacggtccacgaccgggaggtcaacgcagcaaaaaacatcaagctggaaggtttggcgcagtttttaccaaccgcgagcccagcgtaagcgggtcgcggttggagaggaggagcaagggagtgaagtgaggaatgcccggcagggtgttccgaacgaaatggactttgctccgacgatgccggtcgggacgccggggaatgcccgcgattcggctggagggcgttgagcgaagctcaaaagaatttgtgtttcgctcagcgttttccaggccggagggtgggaaacgagagggcgcgtgcgcgcgcctgaaagcctgtgacagggctgtccaaaatattatgacgatgaaaaatggcggaaggatggagtgccggaccgccttgtgaaaaaggagttgaaaaactcctcgaggcggccgcaataatagactagcataaccccttggggcctctaaacgggtcttgaggggttttttgctgaacgtacgttttacggctagctcagtcctaggtactatgctagcgtggagatatacggtaccaaggaggtaaataatgggagactacaaagaccatgacggtgattataaagatcatgacatcgattacaaggatgacgatgacaagggaggatccggcagcatggctaggaaatcaagagcggcagaaggacaagtgattcagtataccactctgaaagttcgtctgtacccgaccccggcgcaagcggagctgtttgagaagacctttggttgttgtcgttacatctggaatcaaatgttgagcgaccagcaaatgttctatgcggagacgggtgcgcatttcatcccgacgccagctaaatacaaaaaaggcgctccgtttctgaccgaagtcgacaaccaggcactgatccaagaacacaacaaactgtctcaggcgttccgcgtgttcttcaagcgaccggaggcgttcggccatccgaattttaagaaaaagaagaccgatcgcgacagctttaccgcctgcaaccacgtgttcgagtctggtccgacaatttatactacgcgtgacggcattcgtatgaccaaggcgggtgttgttaaggcacgttttagccgtcgcgcacaagcttggtggcgtctcaagcgcatcaccgtggagaagaccaagacgcagaaatactactgctatatcttgtacgaacattccggcaagcagccagagccggttattccgaccccggaaaccaccgtcggtctgaagtactccatgcgtcatttctacgtggctgacgatggtacgaccgcggacccgccacgttggctgaagcagagccaggagaagttggtacgcgtccaacagaaacttgctcgcatggaaccgggtagccgtaactatgaggaagcggttcagaaataccgcctgctgcacgaacgtattgcgaaccagcgtagagacttcctgcacaaggaatctagcagaatcgccaacggctgggatgctgtgtgcatgagagacgacgcgctggcggaaatgtccaaaggcccgctgcgcaaagatgcagccagctcgggcttccgtatgctgcgtgaactgctacaatacaaattggagcggcaaggtaaacgtttgatcctccttgatcgttatgcccctacgacccgtgtttgcagcgtgtgcggtcagctgcaggattccgttgactatggtgcacgcacctggacctgtccgaagtgcggcaccgtgcacgatcgcgaagttaatgcagcgaaaaacattaaattagagggcctggcgcaatttttaccgactgcctcgccggcgtaaggccttaagagaaggagatatacatatgttatgtctatcattgaatcaaggagaatacatgaccattggtgaaaacgtggtggtgcaactggatcacgtcaccggtgaccgctgccgtttggttattcatgcaccgaaagaggttccgatcctgcgcggtgaggtgctggaacgtaatggtggccaaagaccagaatgtgtttacgacggccatcgttatcacaagaaggagctgatctggaaccgtagcaaagcgcaggcgctggctgccatgcgtcgtttgctggaggaaatggacggcgcgaacagcgatgttcaagccctgcgtcgccagttaaatcacatgtttccgccggcagatggcggtgcgggtgactccccgcagaccacgcagttctctaacggctaataagaattcctgctgccaccgctgagcaataactagcataaccccttggggcctctaaacgggtcttgaggggttttttgctgaaacctcaggcatttgagaagcacacggtcacactgcttccggtagtcaataaaccggtaaaccagcaatagacataagcggctatttaacgaccctgccctgaaccgacgaccgggtcatcgtggccggatcttgcggcccctcggcttgaacgaattgttagacattatttgccgactaccttggtgatctcgcctttcacgtagtggacaaattcttccaactgatctgcgcgcgaggccaagcgatcttcttcttgtccaagataagcctgtctagcttcaagtatgacgggctgatactgggccggcaggcgctccattgcccagtcggcagcgacatccttcggcgcgattttgccggttactgcgctgtaccaaatgcgggacaacgtaagcactacatttcgctcatcgccagcccagtcgggcggcgagttccatagcgttaaggtttcatttagcgcctcaaatagatcctgttcaggaaccggatcaaagagttcctccgccgctggacctaccaaggcaacgctatgttctcttgcttttgtcagcaagatagccagatcaatgtcgatcgtggctggctcgaagatacctgcaagaatgtcattgcgctgccattctccaaattgcagttcgcgcttagctggataacgccacggaatgatgtcgtcgtgcacaacaatggtgacttctacagcgcggagaatctcgctctctccaggggaagccgaagtttccaaaaggtcgttgatcaaagctcgccgcgttgtttcatcaagccttacggtcaccgtaaccagcaaatcaatatcactgtgtggcttcaggccgccatccactgcggagccgtacaaatgtacggccagcaacgtcggttcgagatggcgctcgatgacgccaactacctctgatagttgagtcgatacttcggcgatcaccgcttccctcatactcttcctttttcaatattattgaagcatttatcagggttattgtctcatgagcggatacatatttgaatgtatttagaaaaataaacaaatagctagctcactcggtcgctacgctccgggcgtgagactgcggcgggcgctgcggacacatacaaagttacccacagattccgtggataagcaggggactaacatgtgaggcaaaacagcagggccgcgccggtggcgtttttccataggctccgccctcctgccagagttcacataaacagacgcttttccggtgcatctgtgggagccgtgaggctcaaccatgaatctgacagtacgggcgaaacccgacaggacttaaagatccccaccgtttccggcgggtcgctccctcttgcgctctcctgttccgaccctgccgtttaccggatacctgttccgcctttctcccttacgggaagtgtggcgctttctcatagctcacacactggtatctcggctcggtgtaggtcgttcgctccaagctgggctgtaagcaagaactccccgttcagcccgactgctgcgccttatccggtaactgttcacttgagtccaacccggaaaagcacggtaaaacgccactggcagcagccattggtaactgggagttcgcagaggatttgtttagctaaacacgcggttgctcttgaagtgtgcgccaaagtccggctacactggaaggacagatttggttgctgtgctctgcgaaagccagttaccacggttaagcagttccccaactgacttaaccttcgatcaaaccacctccccaggtggttttttcgtttacagggcaaaagattacgcgcagaaaaaaaggatctcaagaagatcctttgatcttttctactgaaccgctctagatttcagtgcaatttatctcttcaaatgtagcacctgaagtcagccccatacgatataagttgtaattctcatgttagtcatgccccgcgcccaccggaaggagctgactgggttgaaggctctcaagggcatcggtcgagatcccggtgcctaatgagtgagctaacttacattaattgcgttgcgctcactgcccgctttccagtcgggaaacctgtcgtgccagctgcattaatgaatcggccaacgcgcggggagaggcggtttgcgtattgggcgccagggtggtttttcttttcaccagtgagacgggcaacagctgattgcccttcaccgcctggccctgagagagttgcagcaagcggtccacgctggtttgccccagcaggcgaaaatcctgtttgatggtggttaacggcgggatataacatgagctgtcttcggtatcgtcgtatcccactaccgagatgtccgcaccaacgcgcagcccggactcggtaatggcgcgcattgcgcccagcgccatctgatcgttggcaaccagcatcgcagtgggaacgatgccctcattcagcatttgcatggtttgttgaaaaccggacatggcactccagtcgccttcccgttccgctatcggctgaatttgattgcgagtgagatatttatgccagccagccagacgcagacgcgccgagacagaacttaatgggcccgctaacagcgcgatttgctggtgacccaatgcgaccagatgctccacgcccagtcgcgtaccgtcttcatgggagaaaataatactgttgatgggtgtctggtcagagacatcaagaaataacgccggaacattagtgcaggcagcttccacagcaatggcatcctggtcatccagcggatagttaatgatcagcccactgacgcgttgcgcgagaagattgtgcaccgccgctttacaggcttcgacgccgcttcgttctaccatcgacaccaccacgctggcacccagttgatcggcgcgagatttaatcgccgcgacaatttgcgacggcgcgtgcagggccagactggaggtggcaacgccaatcagcaacgactgtttgcccgccagttgttgtgccacgcggttgggaatgtaattcagctccgccatcgccgcttccactttttcccgcgttttcgcagaaacgtggctggcctggttcaccacgcgggaaacggtctgataagagacaccggcatactctgcgacatcgtataacgttactggtttcac

SEQ ID NO: 5983 - DNA, 5549 bp, synthetic construct
  source 1..5549: mol_type = other DNA
attcaccaccctgaattgactctcttccgggcgctatcatgccataccgcgaaaggttttgcgccattcgatggtgtccgggattgacagctagctcagtcctaggtataatgctagcgtggagatatacctcgagagcggagcaccggcgggggatgaacgctgccatcaacatcaaggccagcggactggtaaaaggccagagccagcaggctgcggcggcccttccactcctctgatacaacaacatctgccggctggaacaccggtgaaggcccatgctcccggtctgggagcgttgagcgaagcggcatacaggaagatgccgtttccctcagcgttctccgggcgggggacgttgggaaacgagagggcgcctctcccaaccgggagccgcgccggaagcccggtcagacgggcgttcccaatattatgacgatgtttacacacaaggagatccccctcctcgaggcggccgcaataatagactagcataaccccttggggcctctaaacgggtcttgaggggttttttgctgaacgtacgttttacggctagctcagtcctaggtactatgctagcgtggagatatacggtaccaaggaggtaaataatgggagactacaaagaccatgacggtgattataaagatcatgacatcgattacaaggatgacgatgacaagggaggatccggcagcatgaaacaagaaaagcaggatggacacgctgagggtaatcgtgttattcagtataacacgattaaagttcgtctgtgtccgacaccggagcaggaggagttgttccagaaaactttcgggtgctgccgttatatctggaatcaaatgttgtctgatcacgaacgtttttacgaagaaaccgatgcgcattttatcccgactccggcaaagtacaaaaaaggcgcaccgttcctgaaagaagttgacaaccaggctctgacccaggagtacaaccgtttgtcgcaagcgtttcgcaacttttttcgtgacccgaagaccttcggctacccgaagttcaaacgtaaaaaggacgaccgtgactcctttacggcatgcaaccaatttttcggctctagcgctaccatttatgccacccgtgacgcggttcgtatgaccaaggcgggtctcgtcaaagctaaattcagccgtcgccctcgtagcggctggaaattgacccgcttaaccgtcgagcgcaccaagaccggcaaatactacggctacctgctgtatacctgcccgacctatcagccggaaccggtggaagcaacggcggaacgtaccatcggcctgaagtacagcgttagccatttctatgttgcggataatggcaacagcgcggacccaccgcgttggctgaggcagtcccaggagaagctggctgtggtccaacgcaagctgtctcgttcccaaccaggttcccaaaactaccaggagctggtgcagaaatatcgccttttacacgagcacatcgcgaaccaacgtcgcgacttcctgcacaaagagagccgccgtattgccaacgcatgggatgccgtgtgcattcgtgaagatagcctgcgtgccatcagcggtaagctgggtggttcagctgtgcatgataccggctttggtatgttccgcgaactcttgcgttacaaattggagcgccaaggtaagcagctgctggaggtagatcgcttggttccgacgaccaaggtgtgcagcgcgtgtggtgcggtgaatgaaaccctgtcgatccgtgcgcgtcggtgggtgtgtccggtttgcggtgctgaacaccgtagaggcatgaatgccgcgatcaacattaaggcaagcggtctggttaaaggtcagagccaacaggcggcagcagcgctgccgctgttgtaaggccttaagagaaggagatatacatatgttacaattgtcactaaggcccggagaatacctgaccatccacggcgatattgttgttcagttggcgcagctctccggcagccgtgcgtttctgcgcgtggaagcagatcgtagcattccgatcgtgcgtggtaaagtgctggaacgttcgggcgctccgcgaccggaatgcctggctagcctgccgcgttctcgcgcgcgtaagggtcgtgacgcggtttatcattggaatggtgctcgcaaacgtgcgattcgtgccatggaacaaatcttagatcagatggagagcgacggcccaagagaagaggttcaagcgttgcgcgtgcaacttgagcagttgctgccgacgcagcaagaggaggagctgtccggtcagatccaggcgctgttccgcgaccaagccgcacgcaacacctaataagaattcctgctgccaccgctgagcaataactagcataaccccttggggcctctaaacgggtcttgaggggttttttgctgaaacctcaggcatttgagaagcacacggtcacactgcttccggtagtcaataaaccggtaaaccagcaatagacataagcggctatttaacgaccctgccctgaaccgacgaccgggtcatcgtggccggatcttgcggcccctcggcttgaacgaattgttagacattatttgccgactaccttggtgatctcgcctttcacgtagtggacaaattcttccaactgatctgcgcgcgaggccaagcgatcttcttcttgtccaagataagcctgtctagcttcaagtatgacgggctgatactgggccggcaggcgctccattgcccagtcggcagcgacatccttcggcgcgattttgccggttactgcgctgtaccaaatgcgggacaacgtaagcactacatttcgctcatcgccagcccagtcgggcggcgagttccatagcgttaaggtttcatttagcgcctcaaatagatcctgttcaggaaccggatcaaagagttcctccgccgctggacctaccaaggcaacgctatgttctcttgcttttgtcagcaagatagccagatcaatgtcgatcgtggctggctcgaagatacctgcaagaatgtcattgcgctgccattctccaaattgcagttcgcgcttagctggataacgccacggaatgatgtcgtcgtgcacaacaatggtgacttctacagcgcggagaatctcgctctctccaggggaagccgaagtttccaaaaggtcgttgatcaaagctcgccgcgttgtttcatcaagccttacggtcaccgtaaccagcaaatcaatatcactgtgtggcttcaggccgccatccactgcggagccgtacaaatgtacggccagcaacgtcggttcgagatggcgctcgatgacgccaactacctctgatagttgagtcgatacttcggcgatcaccgcttccctcatactcttcctttttcaatattattgaagcatttatcagggttattgtctcatgagcggatacatatttgaatgtatttagaaaaataaacaaatagctagctcactcggtcgctacgctccgggcgtgagactgcggcgggcgctgcggacacatacaaagttacccacagattccgtggataagcaggggactaacatgtgaggcaaaacagcagggccgcgccggtggcgtttttccataggctccgccctcctgccagagttcacataaacagacgcttttccggtgcatctgtgggagccgtgaggctcaaccatgaatctgacagtacgggcgaaacccgacaggacttaaagatccccaccgtttccggcgggtcgctccctcttgcgctctcctgttccgaccctgccgtttaccggatacctgttccgcctttctcccttacgggaagtgtggcgctttctcatagctcacacactggtatctcggctcggtgtaggtcgttcgctccaagctgggctgtaagcaagaactccccgttcagcccgactgctgcgccttatccggtaactgttcacttgagtccaacccggaaaagcacggtaaaacgccactggcagcagccattggtaactgggagttcgcagaggatttgtttagctaaacacgcggttgctcttgaagtgtgcgccaaagtccggctacactggaaggacagatttggttgctgtgctctgcgaaagccagttaccacggttaagcagttccccaactgacttaaccttcgatcaaaccacctccccaggtggttttttcgtttacagggcaaaagattacgcgcagaaaaaaaggatctcaagaagatcctttgatcttttctactgaaccgctctagatttcagtgcaatttatctcttcaaatgtagcacctgaagtcagccccatacgatataagttgtaattctcatgttagtcatgccccgcgcccaccggaaggagctgactgggttgaaggctctcaagggcatcggtcgagatcccggtgcctaatgagtgagctaacttacattaattgcgttgcgctcactgcccgctttccagtcgggaaacctgtcgtgccagctgcattaatgaatcggccaacgcgcggggagaggcggtttgcgtattgggcgccagggtggtttttcttttcaccagtgagacgggcaacagctgattgcccttcaccgcctggccctgagagagttgcagcaagcggtccacgctggtttgccccagcaggcgaaaatcctgtttgatggtggttaacggcgggatataacatgagctgtcttcggtatcgtcgtatcccactaccgagatgtccgcaccaacgcgcagcccggactcggtaatggcgcgcattgcgcccagcgccatctgatcgttggcaaccagcatcgcagtgggaacgatgccctcattcagcatttgcatggtttgttgaaaaccggacatggcactccagtcgccttcccgttccgctatcggctgaatttgattgcgagtgagatatttatgccagccagccagacgcagacgcgccgagacagaacttaatgggcccgctaacagcgcgatttgctggtgacccaatgcgaccagatgctccacgcccagtcgcgtaccgtcttcatgggagaaaataatactgttgatgggtgtctggtcagagacatcaagaaataacgccggaacattagtgcaggcagcttccacagcaatggcatcctggtcatccagcggatagttaatgatcagcccactgacgcgttgcgcgagaagattgtgcaccgccgctttacaggcttcgacgccgcttcgttctaccatcgacaccaccacgctggcacccagttgatcggcgcgagatttaatcgccgcgacaatttgcgacggcgcgtgcagggccagactggaggtggcaacgccaatcagcaacgactgtttgcccgccagttgttgtgccacgcggttgggaatgtaattcagctccgccatcgccgcttccactttttcccgcgttttcgcagaaacgtggctggcctggttcaccacgcgggaaacggtctgataagagacaccggcatactctgcgacatcgtataacgttactggtttcac

SEQ ID NO: 5984 - DNA, 5590 bp, synthetic construct
  source 1..5590: mol_type = other DNA
attcaccaccctgaattgactctcttccgggcgctatcatgccataccgcgaaaggttttgcgccattcgatggtgtccgggattgacagctagctcagtcctaggtataatgctagcgtggagatatacctcgaggtgcggcgcggagcacaaacgagggaaaaacgccgccgtcaatatcaaagcccatgggctggcgtgttaccagaataaacaggttgcggaggcagtttcataaccttcctgcaaaaagtgatgttgccggccggaacaccggagaaggcccatgcttcccgttggggagcgttgagcgaagcggcggacagtacgctgccgtttccctcagcgttctccaatccgcgggagatcgttgggaaacgagaagatgcctcccctctggggccgcatccgaagcccggcagggcgttccaaacattatgacgatgatcatccaagatgatcgtaccagcgcaaaggagtgcgctgtctcatcagacacaggaggtctttttgtctcctcgaggcggccgcaataatagactagcataaccccttggggcctctaaacgggtcttgaggggttttttgctgaacgtacgttttacggctagctcagtcctaggtactatgctagcgtggagatatacggtaccaaggaggtaaataatgggagactacaaagaccatgacggtgattataaagatcatgacatcgattacaaggatgacgatgacaagggaggatccggcagcatgaaaatgaatgataacaggagaccctcagcgcccaagcgcaccacccaatataacaccattaagatccgcctgtatccgaatcaagagcaggaggaattatttcagcgtacctttgggtgctgccgttatatttggaatcgcatgctggcggaccacgagcgcttttattacgaaaccgatgcccacttcatcccgactccggcaaaatacaaaaccgaagctccgtttctgaaagaggtggatcatcaggctttgactcaagaatataacaagctgtcgcaggcgtttcgtaactttttccgtaacccggcttccttcggctatccgaagttcaaacgtaaaaaagacgaccgtgacagcttctctgcgtgcaatcaggttatgggtaatagtgcaaccatctatattacccaagatgcagttcgcatgaccaaggcgggtttggttcgtgcaaaattcccgcgcagaccgcgttccggttggaagttgacccgtattaccgttgaacgtaccaagaccggcaagtactacggctacctgctgtttgcgtgtccggtacatgcgccagaaccggttaagccgaccgcagatactacgatcggcctcaaatacagcttgacccatttctacgtgcgtgacgacggcattacggctgacccgcctcgctggctgcgtcaaagccaggacaaagtgtcgagcattcaggagaaacttaatcgtatgcagccgggttctcgcaactatcgtgagatggtccagaaataccgtctgttacacgagcacattgcgaaccaacgccgcgacttccttcacaaggagtcccgtcgtatcgccaacgattgggatgcggtgtgcattcgtgatgacagcctgaaggctatcagcgaagagctgggtggttccgacatccacgatacgggttttggcatgttccgcgagatgctgcgttacaagctggataggcaaggcaaacaactgctggaagttggtcgtttcgatccgaccacgaaagtgtgtagcgtttgcggcgcgatcaacgaaaccctgagcccgaaggcgagacattgggtgtgcccggtgtgcggtgcggaacataaacgcggtaagaacgcggccgtcaacatcaaagcccacggcttggcgtgttatcagaataagcaggtggccgaggcggttagctaaggccttaagagaaggagatatacatatgcttagtctatcattattgcccgatgaatatctgtctatcaacaacggccagattatcgtgcacctgattcgtgttgcaggtggccgtgcgcatttgcgcattgaagcggaccgttccgttccgattgtgcgcggtgccctgctggaacgtgagggcgcggcacgcccggaatgcttgaccccaccgcctcgtcgcaacccgggtcatcgtcgagatcacctgtacctgtggaatgatgaccgcgagcgcgctgtgcgtgcgatccagcaaagcatcgatcgtttagagcaaacgggtgaaaccgctgaagccgacatcctgcgtacccagctgaatcgtttgatcccgaccttctgggaagaggagaaactgccgcgtagactccgcgagcaaactgcggacagcgtctaataagaattcctgctgccaccgctgagcaataactagcataaccccttggggcctctaaacgggtcttgaggggttttttgctgaaacctcaggcatttgagaagcacacggtcacactgcttccggtagtcaataaaccggtaaaccagcaatagacataagcggctatttaacgaccctgccctgaaccgacgaccgggtcatcgtggccggatcttgcggcccctcggcttgaacgaattgttagacattatttgccgactaccttggtgatctcgcctttcacgtagtggacaaattcttccaactgatctgcgcgcgaggccaagcgatcttcttcttgtccaagataagcctgtctagcttcaagtatgacgggctgatactgggccggcaggcgctccattgcccagtcggcagcgacatccttcggcgcgattttgccggttactgcgctgtaccaaatgcgggacaacgtaagcactacatttcgctcatcgccagcccagtcgggcggcgagttccatagcgttaaggtttcatttagcgcctcaaatagatcctgttcaggaaccggatcaaagagttcctccgccgctggacctaccaaggcaacgctatgttctcttgcttttgtcagcaagatagccagatcaatgtcgatcgtggctggctcgaagatacctgcaagaatgtcattgcgctgccattctccaaattgcagttcgcgcttagctggataacgccacggaatgatgtcgtcgtgcacaacaatggtgacttctacagcgcggagaatctcgctctctccaggggaagccgaagtttccaaaaggtcgttgatcaaagctcgccgcgttgtttcatcaagccttacggtcaccgtaaccagcaaatcaatatcactgtgtggcttcaggccgccatccactgcggagccgtacaaatgtacggccagcaacgtcggttcgagatggcgctcgatgacgccaactacctctgatagttgagtcgatacttcggcgatcaccgcttccctcatactcttcctttttcaatattattgaagcatttatcagggttattgtctcatgagcggatacatatttgaatgtatttagaaaaataaacaaatagctagctcactcggtcgctacgctccgggcgtgagactgcggcgggcgctgcggacacatacaaagttacccacagattccgtggataagcaggggactaacatgtgaggcaaaacagcagggccgcgccggtggcgtttttccataggctccgccctcctgccagagttcacataaacagacgcttttccggtgcatctgtgggagccgtgaggctcaaccatgaatctgacagtacgggcgaaacccgacaggacttaaagatccccaccgtttccggcgggtcgctccctcttgcgctctcctgttccgaccctgccgtttaccggatacctgttccgcctttctcccttacgggaagtgtggcgctttctcatagctcacacactggtatctcggctcggtgtaggtcgttcgctccaagctgggctgtaagcaagaactccccgttcagcccgactgctgcgccttatccggtaactgttcacttgagtccaacccggaaaagcacggtaaaacgccactggcagcagccattggtaactgggagttcgcagaggatttgtttagctaaacacgcggttgctcttgaagtgtgcgccaaagtccggctacactggaaggacagatttggttgctgtgctctgcgaaagccagttaccacggttaagcagttccccaactgacttaaccttcgatcaaaccacctccccaggtggttttttcgtttacagggcaaaagattacgcgcagaaaaaaaggatctcaagaagatcctttgatcttttctactgaaccgctctagatttcagtgcaatttatctcttcaaatgtagcacctgaagtcagccccatacgatataagttgtaattctcatgttagtcatgccccgcgcccaccggaaggagctgactgggttgaaggctctcaagggcatcggtcgagatcccggtgcctaatgagtgagctaacttacattaattgcgttgcgctcactgcccgctttccagtcgggaaacctgtcgtgccagctgcattaatgaatcggccaacgcgcggggagaggcggtttgcgtattgggcgccagggtggtttttcttttcaccagtgagacgggcaacagctgattgcccttcaccgcctggccctgagagagttgcagcaagcggtccacgctggtttgccccagcaggcgaaaatcctgtttgatggtggttaacggcgggatataacatgagctgtcttcggtatcgtcgtatcccactaccgagatgtccgcaccaacgcgcagcccggactcggtaatggcgcgcattgcgcccagcgccatctgatcgttggcaaccagcatcgcagtgggaacgatgccctcattcagcatttgcatggtttgttgaaaaccggacatggcactccagtcgccttcccgttccgctatcggctgaatttgattgcgagtgagatatttatgccagccagccagacgcagacgcgccgagacagaacttaatgggcccgctaacagcgcgatttgctggtgacccaatgcgaccagatgctccacgcccagtcgcgtaccgtcttcatgggagaaaataatactgttgatgggtgtctggtcagagacatcaagaaataacgccggaacattagtgcaggcagcttccacagcaatggcatcctggtcatccagcggatagttaatgatcagcccactgacgcgttgcgcgagaagattgtgcaccgccgctttacaggcttcgacgccgcttcgttctaccatcgacaccaccacgctggcacccagttgatcggcgcgagatttaatcgccgcgacaatttgcgacggcgcgtgcagggccagactggaggtggcaacgccaatcagcaacgactgtttgcccgccagttgttgtgccacgcggttgggaatgtaattcagctccgccatcgccgcttccactttttcccgcgttttcgcagaaacgtggctggcctggttcaccacgcgggaaacggtctgataagagacaccggcatactctgcgacatcgtataacgttactggtttcac

SEQ ID NO: 5985 - DNA, 5669 bp, synthetic construct
  source 1..5669: mol_type = other DNA
attcaccaccctgaattgactctcttccgggcgctatcatgccataccgcgaaaggttttgcgccattcgatggtgtccgggattgacagctagctcagtcctaggtataatgctagcgtggagatatacctcgagctgcgggacggagcacaggcgcgaacgcaacgcagcggcgaatgtcaaagccatcggcctgggccggtaccgcacggagacggcagccggcggaattgggtagcacgaagtgccccgcaggtagcgggggtactccatatggccggtcgggacgccggtgaacgcccgcataccctccaataggcggggccgcgggaaacgagaggccgcctcccccttaccggggccgcggcggaagcccggacagccgggcgtccaaaatattatgacgatgataacccttaatctggtttcatccggcctagcgcagccggttgaaatataggaagcgtgcggagagagcaggtgccaaaggccacggagcctgccgaaccgcactaaacaaccaaccgcacaagaaggatactgtgcggcgaccagcaaagtcccttatcatttcatattgaaaggaagcaatttgactcctcgaggcggccgcaataatagactagcataaccccttggggcctctaaacgggtcttgaggggttttttgctgaacgtacgttttacggctagctcagtcctaggtactatgctagcgtggagatatacggtaccaaggaggtaaataatgggagactacaaagaccatgacggtgattataaagatcatgacatcgattacaaggatgacgatgacaagggaggatccggcagcatggggcacagggaaacagtaggacaagctatccaatataacaccattaaagtgcgtttgtacccgagcgtcaaccaaaaagaactgtttcagaagaccttcggctgttgtcgttatatctggaaccagatgttgtctgaccacgagcgcttctatttggaaaccgacgttcattttatcccgactccggcgaagtacaaaaagtctgcaccgtttctgtccaaggtcgacaaccaagcgcttatccaagagcacaacaaactgtcgcaagcgttccgcaacttcttccgtaacccgggtgcattcggctacccgcgtttcaaacgtaaaaaagatgaccgcgacacgtttaccgcgtgcaatcaatttttcggtcgtagcgctaccatctatattacccagaatgcggttcgtatgaccaaggtgggcctggttcgggcggtctttccgcgccgtccgagatccggttggcgtcttacccgtatcacggtggaacgtacccgtaccgacaaatactatggttacctgctgtatgcatgcccggtcaggcctccgcagccggttaccccaaccgaggaaaccacggttggtctcaattattcggttagcagattctacgtggcagacgatggtacagctgcggacccgccacgttggctgcgccaaagccaggatcagctgtgtcagattcagcgtcagctgtgccgtatgcagaagggtagcaagaattaccaggagatggttcagaagtaccgcctgttacatgaacacattgcgaaccaacgtcgtgattttcttcataaagagagccgtcgcatcgccaacgagtgggatgcggtgtgcgtgcgctccgacagcctgaccgcgctggctgccaagaccggtggtggctgcattctggataccggttttggcatgtttcgcgaaatgttgcgctacaagctggaacgtcaaggtaaatccctgttgttggttgacagattccgcccgaccaccaaggtgtgcagcgtgtgcggctacgttaatgaagatctgccggcggaagctctgagatggcgttgtccggtgtgcggcaccgagcaccgtcgtgagcgtaacgccgctgcgaatgttaaagcaattggtctgggccgttatcgcactgagactgcggccggtggtattggctaaggccttaagagaaggagatatacatatgttgtcactacaattaaaaagtggagaatacgtgaccattggcgaagagatcgccgtccaggtattcaaacaatccggcgatagctttcatgttgcggtgaaagctccgcgtgaagttccgattctgagaggtaaagttcttgagcgcaccgaacgccgtccggacggcctgtaccgccgtccgccacagtccccgagcgaacaacgtcacaacgcaaagcgcttggaggcgtggacgctgaagaaggccatgcgtgagcaaatccgcgcggcggctatggaagacttgctggaggtggcgcagtatatcgaggacctggcagtggatcgttcttgttgcgtggaacgtcagcgtctgtcggtgctgggtgttcgtattaccaaagcggtcagcgttctcaatagcactggtggtggcatgtaataagaattcctgctgccaccgctgagcaataactagcataaccccttggggcctctaaacgggtcttgaggggttttttgctgaaacctcaggcatttgagaagcacacggtcacactgcttccggtagtcaataaaccggtaaaccagcaatagacataagcggctatttaacgaccctgccctgaaccgacgaccgggtcatcgtggccggatcttgcggcccctcggcttgaacgaattgttagacattatttgccgactaccttggtgatctcgcctttcacgtagtggacaaattcttccaactgatctgcgcgcgaggccaagcgatcttcttcttgtccaagataagcctgtctagcttcaagtatgacgggctgatactgggccggcaggcgctccattgcccagtcggcagcgacatccttcggcgcgattttgccggttactgcgctgtaccaaatgcgggacaacgtaagcactacatttcgctcatcgccagcccagtcgggcggcgagttccatagcgttaaggtttcatttagcgcctcaaatagatcctgttcaggaaccggatcaaagagttcctccgccgctggacctaccaaggcaacgctatgttctcttgcttttgtcagcaagatagccagatcaatgtcgatcgtggctggctcgaagatacctgcaagaatgtcattgcgctgccattctccaaattgcagttcgcgcttagctggataacgccacggaatgatgtcgtcgtgcacaacaatggtgacttctacagcgcggagaatctcgctctctccaggggaagccgaagtttccaaaaggtcgttgatcaaagctcgccgcgttgtttcatcaagccttacggtcaccgtaaccagcaaatcaatatcactgtgtggcttcaggccgccatccactgcggagccgtacaaatgtacggccagcaacgtcggttcgagatggcgctcgatgacgccaactacctctgatagttgagtcgatacttcggcgatcaccgcttccctcatactcttcctttttcaatattattgaagcatttatcagggttattgtctcatgagcggatacatatttgaatgtatttagaaaaataaacaaatagctagctcactcggtcgctacgctccgggcgtgagactgcggcgggcgctgcggacacatacaaagttacccacagattccgtggataagcaggggactaacatgtgaggcaaaacagcagggccgcgccggtggcgtttttccataggctccgccctcctgccagagttcacataaacagacgcttttccggtgcatctgtgggagccgtgaggctcaaccatgaatctgacagtacgggcgaaacccgacaggacttaaagatccccaccgtttccggcgggtcgctccctcttgcgctctcctgttccgaccctgccgtttaccggatacctgttccgcctttctcccttacgggaagtgtggcgctttctcatagctcacacactggtatctcggctcggtgtaggtcgttcgctccaagctgggctgtaagcaagaactccccgttcagcccgactgctgcgccttatccggtaactgttcacttgagtccaacccggaaaagcacggtaaaacgccactggcagcagccattggtaactgggagttcgcagaggatttgtttagctaaacacgcggttgctcttgaagtgtgcgccaaagtccggctacactggaaggacagatttggttgctgtgctctgcgaaagccagttaccacggttaagcagttccccaactgacttaaccttcgatcaaaccacctccccaggtggttttttcgtttacagggcaaaagattacgcgcagaaaaaaaggatctcaagaagatcctttgatcttttctactgaaccgctctagatttcagtgcaatttatctcttcaaatgtagcacctgaagtcagccccatacgatataagttgtaattctcatgttagtcatgccccgcgcccaccggaaggagctgactgggttgaaggctctcaagggcatcggtcgagatcccggtgcctaatgagtgagctaacttacattaattgcgttgcgctcactgcccgctttccagtcgggaaacctgtcgtgccagctgcattaatgaatcggccaacgcgcggggagaggcggtttgcgtattgggcgccagggtggtttttcttttcaccagtgagacgggcaacagctgattgcccttcaccgcctggccctgagagagttgcagcaagcggtccacgctggtttgccccagcaggcgaaaatcctgtttgatggtggttaacggcgggatataacatgagctgtcttcggtatcgtcgtatcccactaccgagatgtccgcaccaacgcgcagcccggactcggtaatggcgcgcattgcgcccagcgccatctgatcgttggcaaccagcatcgcagtgggaacgatgccctcattcagcatttgcatggtttgttgaaaaccggacatggcactccagtcgccttcccgttccgctatcggctgaatttgattgcgagtgagatatttatgccagccagccagacgcagacgcgccgagacagaacttaatgggcccgctaacagcgcgatttgctggtgacccaatgcgaccagatgctccacgcccagtcgcgtaccgtcttcatgggagaaaataatactgttgatgggtgtctggtcagagacatcaagaaataacgccggaacattagtgcaggcagcttccacagcaatggcatcctggtcatccagcggatagttaatgatcagcccactgacgcgttgcgcgagaagattgtgcaccgccgctttacaggcttcgacgccgcttcgttctaccatcgacaccaccacgctggcacccagttgatcggcgcgagatttaatcgccgcgacaatttgcgacggcgcgtgcagggccagactggaggtggcaacgccaatcagcaacgactgtttgcccgccagttgttgtgccacgcggttgggaatgtaattcagctccgccatcgccgcttccactttttcccgcgttttcgcagaaacgtggctggcctggttcaccacgcgggaaacggtctgataagagacaccggcatactctgcgacatcgtataacgttactggtttcac

SEQ ID NO: 5986 - DNA, 5696 bp, synthetic construct
  source 1..5696: mol_type = other DNA
attcaccaccctgaattgactctcttccgggcgctatcatgccataccgcgaaaggttttgcgccattcgatggtgtccgggattgacagctagctcagtcctaggtataatgctagcgtggagatatacctcgagctgtggtacaacgcttgaccgtgccaaaaatgcggcgcaaaacctgcgcgatcagggccttgtacaatattccgcttcccagaggcagcgcgcttcggcctgactctgtcataggaccggttgggacaccggtgtctgcccatgacacaaggatgcggaagcgttgattgggtcgaaagaacgggtttctttcgacgcgatcagcgtttccgttcggatgtgaagtgggaacaaaagacggcaacctccgccatccccaggagcgcgcccgaagcccggcatgccgggcagtccccgagaatccaacattatatttgttttcatccggccgacgggtcggttgaaatagagttcatgcgtcccatgattttgggcagttcggccgaatgtccgaagttccatgacgcttccacgacctgtgctggggtaaattggatggccccgtcacactaatcagatttaggaggaacctaattctcctcgaggcggccgcaataatagactagcataaccccttggggcctctaaacgggtcttgaggggttttttgctgaacgtacgttttacggctagctcagtcctaggtactatgctagcgtggagatatacggtaccaaggaggtaaataatgggagactacaaagaccatgacggtgattataaagatcatgacatcgattacaaggatgacgatgacaagggaggatccggcagcatggctcaaacgaaaacatggaatactacaatcaaggtgcgtctggacccaaccccggcccaagcggcgtttttcgacgaaaactttaactgctgccgttatctgtggaatcaaatgctgtcggatcaaatccgcttctacacggaaaccgatgcacatttcatcccgacgccggcgaagtacaaaaaagacgctccgtttctgaaagaggctgactctaacgcgctggtcagcgtgcatcagaacttgcacaaggcgttccagcgtttctttagcaacccgtcgcgttaccgtcacccgacctttaaaagcaaaaagcgctgcaaaaacagctataccacgtattgccagtactaccgcagcggcaaaggtacttctatttatttgaccaaagatggtattcgtctgccaaaagctggccttgtgaaagcaaggttgcatcgtcgtccgttgcactggtggacgctgaaaactgcaaccatttccaagacttcatccggtaaatactactgcagcctggtttttgcgtataccaccaagccctctcgccagattccgccaaccccggaaaccaccctgggcttgaattacagcctgagtcacttctacatcgatagcaacggccacgctgcggacccgccgcattggctggcaagaagccaggacaaattgcgttatatgcaacaacaactggcgcgtatgcagccgggttcccgtaattacgagcagcagctgtataagatccagcgcctccacgagcacatctccaaccaacgcaaggacttcctccacaaggagagccgccgtatcgccaatgcctgggatgccgtttgtgttaaagacaccaacctggtgaagatgagccaagctattaagctgggtcacgttatggatgcgggttatggtcgttttcgtagctatctgcagtacaagctggagcgcttaggcaagccgtatatcgtggttgaaaaatacttcccgtccaccaagacctgtcatcattgtggcagcgtaaatgaagcgcttccggctggtgcgaagcgttggacctgcccgatttgcggcacgaccctggaccgtgcaaaaaacgcggcccagaatctccgcgatcaaggtttggtccagtactctgcgagccaaagacagcgtgcgtctgcgtaaggccttaagagaaggagatatacatatgctatcattacaaataaaaagtggagaatacattaccattggcgagaacgtggtcatccaggttttccagcgtagcggttctcagtttcgtttggcgatccaagctccgcgtgaactgagcattgttcgcggtgaggtgagagagcgtcagggcaatgctcgcccggaatccgtgtgcgatccgagcaatggtccgatggttcgtcaacaagcgcgccgtatgcagcgtttagaggcacgccaaaaagcagcggcgatccgcgcagacgccgttcagcagttgcgcaccctgctgcaccaatcggatgcgggtgcggcgatcgaattggccgtggcgctgcagctggaacgtcttgagcagtccgaaattctggctactgaaggcggtgccacccgtgacggcacgaacaagaacctggagcacgaccatcaaagcgcgccataataagaattcctgctgccaccgctgagcaataactagcataaccccttggggcctctaaacgggtcttgaggggttttttgctgaaacctcaggcatttgagaagcacacggtcacactgcttccggtagtcaataaaccggtaaaccagcaatagacataagcggctatttaacgaccctgccctgaaccgacgaccgggtcatcgtggccggatcttgcggcccctcggcttgaacgaattgttagacattatttgccgactaccttggtgatctcgcctttcacgtagtggacaaattcttccaactgatctgcgcgcgaggccaagcgatcttcttcttgtccaagataagcctgtctagcttcaagtatgacgggctgatactgggccggcaggcgctccattgcccagtcggcagcgacatccttcggcgcgattttgccggttactgcgctgtaccaaatgcgggacaacgtaagcactacatttcgctcatcgccagcccagtcgggcggcgagttccatagcgttaaggtttcatttagcgcctcaaatagatcctgttcaggaaccggatcaaagagttcctccgccgctggacctaccaaggcaacgctatgttctcttgcttttgtcagcaagatagccagatcaatgtcgatcgtggctggctcgaagatacctgcaagaatgtcattgcgctgccattctccaaattgcagttcgcgcttagctggataacgccacggaatgatgtcgtcgtgcacaacaatggtgacttctacagcgcggagaatctcgctctctccaggggaagccgaagtttccaaaaggtcgttgatcaaagctcgccgcgttgtttcatcaagccttacggtcaccgtaaccagcaaatcaatatcactgtgtggcttcaggccgccatccactgcggagccgtacaaatgtacggccagcaacgtcggttcgagatggcgctcgatgacgccaactacctctgatagttgagtcgatacttcggcgatcaccgcttccctcatactcttcctttttcaatattattgaagcatttatcagggttattgtctcatgagcggatacatatttgaatgtatttagaaaaataaacaaatagctagctcactcggtcgctacgctccgggcgtgagactgcggcgggcgctgcggacacatacaaagttacccacagattccgtggataagcaggggactaacatgtgaggcaaaacagcagggccgcgccggtggcgtttttccataggctccgccctcctgccagagttcacataaacagacgcttttccggtgcatctgtgggagccgtgaggctcaaccatgaatctgacagtacgggcgaaacccgacaggacttaaagatccccaccgtttccggcgggtcgctccctcttgcgctctcctgttccgaccctgccgtttaccggatacctgttccgcctttctcccttacgggaagtgtggcgctttctcatagctcacacactggtatctcggctcggtgtaggtcgttcgctccaagctgggctgtaagcaagaactccccgttcagcccgactgctgcgccttatccggtaactgttcacttgagtccaacccggaaaagcacggtaaaacgccactggcagcagccattggtaactgggagttcgcagaggatttgtttagctaaacacgcggttgctcttgaagtgtgcgccaaagtccggctacactggaaggacagatttggttgctgtgctctgcgaaagccagttaccacggttaagcagttccccaactgacttaaccttcgatcaaaccacctccccaggtggttttttcgtttacagggcaaaagattacgcgcagaaaaaaaggatctcaagaagatcctttgatcttttctactgaaccgctctagatttcagtgcaatttatctcttcaaatgtagcacctgaagtcagccccatacgatataagttgtaattctcatgttagtcatgccccgcgcccaccggaaggagctgactgggttgaaggctctcaagggcatcggtcgagatcccggtgcctaatgagtgagctaacttacattaattgcgttgcgctcactgcccgctttccagtcgggaaacctgtcgtgccagctgcattaatgaatcggccaacgcgcggggagaggcggtttgcgtattgggcgccagggtggtttttcttttcaccagtgagacgggcaacagctgattgcccttcaccgcctggccctgagagagttgcagcaagcggtccacgctggtttgccccagcaggcgaaaatcctgtttgatggtggttaacggcgggatataacatgagctgtcttcggtatcgtcgtatcccactaccgagatgtccgcaccaacgcgcagcccggactcggtaatggcgcgcattgcgcccagcgccatctgatcgttggcaaccagcatcgcagtgggaacgatgccctcattcagcatttgcatggtttgttgaaaaccggacatggcactccagtcgccttcccgttccgctatcggctgaatttgattgcgagtgagatatttatgccagccagccagacgcagacgcgccgagacagaacttaatgggcccgctaacagcgcgatttgctggtgacccaatgcgaccagatgctccacgcccagtcgcgtaccgtcttcatgggagaaaataatactgttgatgggtgtctggtcagagacatcaagaaataacgccggaacattagtgcaggcagcttccacagcaatggcatcctggtcatccagcggatagttaatgatcagcccactgacgcgttgcgcgagaagattgtgcaccgccgctttacaggcttcgacgccgcttcgttctaccatcgacaccaccacgctggcacccagttgatcggcgcgagatttaatcgccgcgacaatttgcgacggcgcgtgcagggccagactggaggtggcaacgccaatcagcaacgactgtttgcccgccagttgttgtgccacgcggttgggaatgtaattcagctccgccatcgccgcttccactttttcccgcgttttcgcagaaacgtggctggcctggttcaccacgcgggaaacggtctgataagagacaccggcatactctgcgacatcgtataacgttactggtttcac

SEQ ID NO: 5987 - DNA, 5161 bp, synthetic construct
  source 1..5161: mol_type = other DNA
attcaccaccctgaattgactctcttccgggcgctatcatgccataccgcgaaaggttttgcgccattcgatggtgtccgggattgacagctagctcagtcctaggtataatgctagcgtggagatatacctcgaggaatgccggcatcaatatccggcgggagggcatccgtcagttctatgcagagcgggcggtggaacctgtgactttcttcgaaagtcatgcggcagcatcataatcgcagtccaaaatattatcttttgccggtaggagcaccggcctatgcccgccattctaggcagcacggacgggaaccgtgcctaacatgaccgtcgaacgggaaaagagaatgcataccctggcctatgccaggatacgcctgaagcccccagctttagccgtgtagggttagcgtaacgccctatgtaggggtagctcacgaaagacgcctctctacggaaattcgcaaagcggcatccgcatataatagatatagacagggacatctctgttcccaagagaggaggaactggcacctcctcgaggcggccgcaataatagactagcataaccccttggggcctctaaacgggtcttgaggggttttttgctgaacgtacgttttacggctagctcagtcctaggtactatgctagcgtggagatatacggtaccaaggaggtaaataatgggagactacaaagaccatgacggtgattataaagatcatgacatcgattacaaggatgacgatgacaagggaggatccggcagcatgaagcagcaaagggctgtaaaagttgaattatacccgacggatgagcagcgcattctgatccataagaccttcggctgcgtgcgtgcggtttggaatgatatgctgggcgatgagcaagagttctacgcggctgcggataagcactttatcccgaccactgcgaagtacaagaagaagcgcccttatctgtccgaggtggacagcctggcgctgtgtaatgcgcaattagccctgaagaaggcgtttaaacgcttctttgaaaacccgggtcacttcggtcatccgaagttcaagactaagaagaaggcgaaaaagtcctataccacgaactgccagtatcatgttagcggtccgaccgtttataccgctaaagacgcgattcgcctgccaaaattgggcctggtcaaagccaagttgtaccgtaataccccggataactgggtcctgaagtctgcaaccatctcagagacaaaaagtggccgtatcttctgcgcattgctgtacgaatttgatgttccggcaccgaaagaggttctgccgaccctggaaaatagcattggtctggattatagctcgccgctgttttacgtggaccatgaaaaccgttccccggacaaaccgcagtggtttcgcgagtccgaagcaaaacttgctcacgaacagcgtttgctgtctcacatgaaatacggcagcaaaaattatatccgccagctccacaaaatcgaagtgctgcaagagcacatcgccaaccagcgtaaagacttcgcccacaaagagagccgtcgtatcgcgaacgcgtatggcgcagtttgtgttgaagatctcgacctgcaggctatggctcagagcttgaatctgggtaaagcgaccaacgacaacggctttggcatgtttagagagttcttgaaatacaagctggaggagcaaggtaagcacctgattaaagtggacaaatggtatccaagcagcaaaacgtgccattactgcggtggttattacaaggacttacagctgggcgaagaggaatgggtgtgcccgcattgtggtaaacacattctgcgtaaccaaaacgcgggtattaacatccgccgtgagggtattcgtcaattttacgcggaacgtgcggtagagccggtgaccttcttcgaatcccatgcagctgctagctaataagaattcctgctgccaccgctgagcaataactagcataaccccttggggcctctaaacgggtcttgaggggttttttgctgaaacctcaggcatttgagaagcacacggtcacactgcttccggtagtcaataaaccggtaaaccagcaatagacataagcggctatttaacgaccctgccctgaaccgacgaccgggtcatcgtggccggatcttgcggcccctcggcttgaacgaattgttagacattatttgccgactaccttggtgatctcgcctttcacgtagtggacaaattcttccaactgatctgcgcgcgaggccaagcgatcttcttcttgtccaagataagcctgtctagcttcaagtatgacgggctgatactgggccggcaggcgctccattgcccagtcggcagcgacatccttcggcgcgattttgccggttactgcgctgtaccaaatgcgggacaacgtaagcactacatttcgctcatcgccagcccagtcgggcggcgagttccatagcgttaaggtttcatttagcgcctcaaatagatcctgttcaggaaccggatcaaagagttcctccgccgctggacctaccaaggcaacgctatgttctcttgcttttgtcagcaagatagccagatcaatgtcgatcgtggctggctcgaagatacctgcaagaatgtcattgcgctgccattctccaaattgcagttcgcgcttagctggataacgccacggaatgatgtcgtcgtgcacaacaatggtgacttctacagcgcggagaatctcgctctctccaggggaagccgaagtttccaaaaggtcgttgatcaaagctcgccgcgttgtttcatcaagccttacggtcaccgtaaccagcaaatcaatatcactgtgtggcttcaggccgccatccactgcggagccgtacaaatgtacggccagcaacgtcggttcgagatggcgctcgatgacgccaactacctctgatagttgagtcgatacttcggcgatcaccgcttccctcatactcttcctttttcaatattattgaagcatttatcagggttattgtctcatgagcggatacatatttgaatgtatttagaaaaataaacaaatagctagctcactcggtcgctacgctccgggcgtgagactgcggcgggcgctgcggacacatacaaagttacccacagattccgtggataagcaggggactaacatgtgaggcaaaacagcagggccgcgccggtggcgtttttccataggctccgccctcctgccagagttcacataaacagacgcttttccggtgcatctgtgggagccgtgaggctcaaccatgaatctgacagtacgggcgaaacccgacaggacttaaagatccccaccgtttccggcgggtcgctccctcttgcgctctcctgttccgaccctgccgtttaccggatacctgttccgcctttctcccttacgggaagtgtggcgctttctcatagctcacacactggtatctcggctcggtgtaggtcgttcgctccaagctgggctgtaagcaagaactccccgttcagcccgactgctgcgccttatccggtaactgttcacttgagtccaacccggaaaagcacggtaaaacgccactggcagcagccattggtaactgggagttcgcagaggatttgtttagctaaacacgcggttgctcttgaagtgtgcgccaaagtccggctacactggaaggacagatttggttgctgtgctctgcgaaagccagttaccacggttaagcagttccccaactgacttaaccttcgatcaaaccacctccccaggtggttttttcgtttacagggcaaaagattacgcgcagaaaaaaaggatctcaagaagatcctttgatcttttctactgaaccgctctagatttcagtgcaatttatctcttcaaatgtagcacctgaagtcagccccatacgatataagttgtaattctcatgttagtcatgccccgcgcccaccggaaggagctgactgggttgaaggctctcaagggcatcggtcgagatcccggtgcctaatgagtgagctaacttacattaattgcgttgcgctcactgcccgctttccagtcgggaaacctgtcgtgccagctgcattaatgaatcggccaacgcgcggggagaggcggtttgcgtattgggcgccagggtggtttttcttttcaccagtgagacgggcaacagctgattgcccttcaccgcctggccctgagagagttgcagcaagcggtccacgctggtttgccccagcaggcgaaaatcctgtttgatggtggttaacggcgggatataacatgagctgtcttcggtatcgtcgtatcccactaccgagatgtccgcaccaacgcgcagcccggactcggtaatggcgcgcattgcgcccagcgccatctgatcgttggcaaccagcatcgcagtgggaacgatgccctcattcagcatttgcatggtttgttgaaaaccggacatggcactccagtcgccttcccgttccgctatcggctgaatttgattgcgagtgagatatttatgccagccagccagacgcagacgcgccgagacagaacttaatgggcccgctaacagcgcgatttgctggtgacccaatgcgaccagatgctccacgcccagtcgcgtaccgtcttcatgggagaaaataatactgttgatgggtgtctggtcagagacatcaagaaataacgccggaacattagtgcaggcagcttccacagcaatggcatcctggtcatccagcggatagttaatgatcagcccactgacgcgttgcgcgagaagattgtgcaccgccgctttacaggcttcgacgccgcttcgttctaccatcgacaccaccacgctggcacccagttgatcggcgcgagatttaatcgccgcgacaatttgcgacggcgcgtgcagggccagactggaggtggcaacgccaatcagcaacgactgtttgcccgccagttgttgtgccacgcggttgggaatgtaattcagctccgccatcgccgcttccactttttcccgcgttttcgcagaaacgtggctggcctggttcaccacgcgggaaacggtctgataagagacaccggcatactctgcgacatcgtataacgttactggtttcac

SEQ ID NO: 5988 - DNA, 5157 bp, synthetic construct
  source 1..5157: mol_type = other DNA
attcaccaccctgaattgactctcttccgggcgctatcatgccataccgcgaaaggttttgcgccattcgatggtgtccgggattgacagctagctcagtcctaggtataatgctagcgtggagatatacctcgaggcggccgcaataatagactagcataaccccttggggcctctaaacgggtcttgaggggttttttgctgaacgtacgttttacggctagctcagtcctaggtactatgctagcgtggagatatacggtaccaaggaggtaaataatgggagactacaaagaccatgacggtgattataaagatcatgacatcgattacaaggatgacgatgacaagggaggatccggcagcatggcagctaaaaggtcaaagagtgaaacattgcgctacaccaccctgaaggtgcgtttgtacccaagcgctgaacaggcggcgctgtttgaaaagacctttgggtgctgccgttacatctggaatcaaatgttggcggaccagcagcgtttttacatcgaaacggataaattcttcatcccgacaccggctaagtataaagcaggcgccccgtttttgaaggaggtcgacaaccaggcgttaattcaagagcacaataaactgggtcaggcgtttcgcgtttttttcaagtcaccggagaacttcggctacccgaaattcaaacgtaagaaggacgaccgtgacagctttaccgtttgtaatcatgttatgggtaattccgaaacggtgtataccactcgtgatggcctgcgtatgaccaaagcgggtattgtgcgggcaaagttcccgcgtcgtccgcaaggttggtggaaactgaagcgcgtgaccgtggatcgtacccgtagtggtaaatactatggttatatcctgtatgaatgcccggaaaagaagccggaggtggttgtaccgaccccggagactacggtgggtctgaagtacagcatggcgcgtttttatgttgctgataccggcgaaaccgcagacccgccgcattggctgaagcagagccaggagaagctcgctcgcattcaacaacgcctgaaccgcatgcgtccgggttcgaaaaactatcaggaaaccgtccagaaataccgtttgctccacgaacacattgcgaaccaacgtcgtgacttcatacataaggaaagccgtagaatcgccaacgcctgggatgccgtgtgcgttagaggtgatgatatggaacaaatctcccgcattaccaaccgtggcaacgcactggaagcaggttttggcatgttccgcgagtgcctgcgttacaaactggcccgccagggcaaagagctgctggttgtcgaccgttacttcccatccacccgcacgtgcagcgcgtgtggcagagtgatgccggaagagatcagcatgaaaaggcgcacctggacctgcccacaatgtggcgcagttctgaaacgtgaggcgaacgcggcgcgcaatattaaagaccaaggactggcgcagtatttctctacgcgtgagcgcagagagtctgcgtaaggccttaagagaaggagatatacatatgttatgtttgaatctaacacccggagaatacatgacgatcggcgactcggtcgtggtgcaattggaccgtattagcggtgaccgctgcaagctgatgattgatgcgccacgtgagatcccggtattgagaggcgaggttctggaacgcaccggcggtgagcgcccttcttgtgttgtggaaggtccgcgttggcatcgtcgcgagatcccgtggaatcgtagcaaggcgcaggcgctcgcggcaatgcgtatgctgctgagcgaaatggatggccgtgattccaacgttcaagccctgcgccgtcagctggaccacatgttcccgccggaaccgggtcgtgagaaaaccgaattaccggcacgtgctagcaacaactaataagaattcctgctgccaccgctgagcaataactagcataaccccttggggcctctaaacgggtcttgaggggttttttgctgaaacctcaggcatttgagaagcacacggtcacactgcttccggtagtcaataaaccggtaaaccagcaatagacataagcggctatttaacgaccctgccctgaaccgacgaccgggtcatcgtggccggatcttgcggcccctcggcttgaacgaattgttagacattatttgccgactaccttggtgatctcgcctttcacgtagtggacaaattcttccaactgatctgcgcgcgaggccaagcgatcttcttcttgtccaagataagcctgtctagcttcaagtatgacgggctgatactgggccggcaggcgctccattgcccagtcggcagcgacatccttcggcgcgattttgccggttactgcgctgtaccaaatgcgggacaacgtaagcactacatttcgctcatcgccagcccagtcgggcggcgagttccatagcgttaaggtttcatttagcgcctcaaatagatcctgttcaggaaccggatcaaagagttcctccgccgctggacctaccaaggcaacgctatgttctcttgcttttgtcagcaagatagccagatcaatgtcgatcgtggctggctcgaagatacctgcaagaatgtcattgcgctgccattctccaaattgcagttcgcgcttagctggataacgccacggaatgatgtcgtcgtgcacaacaatggtgacttctacagcgcggagaatctcgctctctccaggggaagccgaagtttccaaaaggtcgttgatcaaagctcgccgcgttgtttcatcaagccttacggtcaccgtaaccagcaaatcaatatcactgtgtggcttcaggccgccatccactgcggagccgtacaaatgtacggccagcaacgtcggttcgagatggcgctcgatgacgccaactacctctgatagttgagtcgatacttcggcgatcaccgcttccctcatactcttcctttttcaatattattgaagcatttatcagggttattgtctcatgagcggatacatatttgaatgtatttagaaaaataaacaaatagctagctcactcggtcgctacgctccgggcgtgagactgcggcgggcgctgcggacacatacaaagttacccacagattccgtggataagcaggggactaacatgtgaggcaaaacagcagggccgcgccggtggcgtttttccataggctccgccctcctgccagagttcacataaacagacgcttttccggtgcatctgtgggagccgtgaggctcaaccatgaatctgacagtacgggcgaaacccgacaggacttaaagatccccaccgtttccggcgggtcgctccctcttgcgctctcctgttccgaccctgccgtttaccggatacctgttccgcctttctcccttacgggaagtgtggcgctttctcatagctcacacactggtatctcggctcggtgtaggtcgttcgctccaagctgggctgtaagcaagaactccccgttcagcccgactgctgcgccttatccggtaactgttcacttgagtccaacccggaaaagcacggtaaaacgccactggcagcagccattggtaactgggagttcgcagaggatttgtttagctaaacacgcggttgctcttgaagtgtgcgccaaagtccggctacactggaaggacagatttggttgctgtgctctgcgaaagccagttaccacggttaagcagttccccaactgacttaaccttcgatcaaaccacctccccaggtggttttttcgtttacagggcaaaagattacgcgcagaaaaaaaggatctcaagaagatcctttgatcttttctactgaaccgctctagatttcagtgcaatttatctcttcaaatgtagcacctgaagtcagccccatacgatataagttgtaattctcatgttagtcatgccccgcgcccaccggaaggagctgactgggttgaaggctctcaagggcatcggtcgagatcccggtgcctaatgagtgagctaacttacattaattgcgttgcgctcactgcccgctttccagtcgggaaacctgtcgtgccagctgcattaatgaatcggccaacgcgcggggagaggcggtttgcgtattgggcgccagggtggtttttcttttcaccagtgagacgggcaacagctgattgcccttcaccgcctggccctgagagagttgcagcaagcggtccacgctggtttgccccagcaggcgaaaatcctgtttgatggtggttaacggcgggatataacatgagctgtcttcggtatcgtcgtatcccactaccgagatgtccgcaccaacgcgcagcccggactcggtaatggcgcgcattgcgcccagcgccatctgatcgttggcaaccagcatcgcagtgggaacgatgccctcattcagcatttgcatggtttgttgaaaaccggacatggcactccagtcgccttcccgttccgctatcggctgaatttgattgcgagtgagatatttatgccagccagccagacgcagacgcgccgagacagaacttaatgggcccgctaacagcgcgatttgctggtgacccaatgcgaccagatgctccacgcccagtcgcgtaccgtcttcatgggagaaaataatactgttgatgggtgtctggtcagagacatcaagaaataacgccggaacattagtgcaggcagcttccacagcaatggcatcctggtcatccagcggatagttaatgatcagcccactgacgcgttgcgcgagaagattgtgcaccgccgctttacaggcttcgacgccgcttcgttctaccatcgacaccaccacgctggcacccagttgatcggcgcgagatttaatcgccgcgacaatttgcgacggcgcgtgcagggccagactggaggtggcaacgccaatcagcaacgactgtttgcccgccagttgttgtgccacgcggttgggaatgtaattcagctccgccatcgccgcttccactttttcccgcgttttcgcagaaacgtggctggcctggttcaccacgcgggaaacggtctgataagagacaccggcatactctgcgacatcgtataacgttactggtttcac

SEQ ID NO: 5989 - DNA, 5361 bp, synthetic construct
  source 1..5361: mol_type = other DNA
attcaccaccctgaattgactctcttccgggcgctatcatgccataccgcgaaaggttttgcgccattcgatggtgtccgggattgacagctagctcagtcctaggtataatgctagcgtggagatatacctcgagatgcggcgcggtcctgaaacgggaggcaaatgccgccaggaacatcaaggaccaggggctggcccaatatttcagtacgcgggagcggcgcgaaagcgcgtgaagctctttgtattgtctcagctataccggtcggaacgccggagaaggcccatgcttgcgggaaacgttgagcgaagcacaattgaaaaagttgcgtttcgtgcggccgcaataatagactagcataaccccttggggcctctaaacgggtcttgaggggttttttgctgaacgtacgttttacggctagctcagtcctaggtactatgctagcgtggagatatacggtaccaaggaggtaaataatgggagactacaaagaccatgacggtgattataaagatcatgacatcgattacaaggatgacgatgacaagggaggatccggcagcatggcagctaaaaggtcaaagagtgaaacattgcgctacaccaccctgaaggtgcgtttgtacccaagcgctgaacaggcggcgctgtttgaaaagacctttgggtgctgccgttacatctggaatcaaatgttggcggaccagcagcgtttttacatcgaaacggataaattcttcatcccgacaccggctaagtataaagcaggcgccccgtttttgaaggaggtcgacaaccaggcgttaattcaagagcacaataaactgggtcaggcgtttcgcgtttttttcaagtcaccggagaacttcggctacccgaaattcaaacgtaagaaggacgaccgtgacagctttaccgtttgtaatcatgttatgggtaattccgaaacggtgtataccactcgtgatggcctgcgtatgaccaaagcgggtattgtgcgggcaaagttcccgcgtcgtccgcaaggttggtggaaactgaagcgcgtgaccgtggatcgtacccgtagtggtaaatactatggttatatcctgtatgaatgcccggaaaagaagccggaggtggttgtaccgaccccggagactacggtgggtctgaagtacagcatggcgcgtttttatgttgctgataccggcgaaaccgcagacccgccgcattggctgaagcagagccaggagaagctcgctcgcattcaacaacgcctgaaccgcatgcgtccgggttcgaaaaactatcaggaaaccgtccagaaataccgtttgctccacgaacacattgcgaaccaacgtcgtgacttcatacataaggaaagccgtagaatcgccaacgcctgggatgccgtgtgcgttagaggtgatgatatggaacaaatctcccgcattaccaaccgtggcaacgcactggaagcaggttttggcatgttccgcgagtgcctgcgttacaaactggcccgccagggcaaagagctgctggttgtcgaccgttacttcccatccacccgcacgtgcagcgcgtgtggcagagtgatgccggaagagatcagcatgaaaaggcgcacctggacctgcccacaatgtggcgcagttctgaaacgtgaggcgaacgcggcgcgcaatattaaagaccaaggactggcgcagtatttctctacgcgtgagcgcagagagtctgcgtaaggccttaagagaaggagatatacatatgttatgtttgaatctaacacccggagaatacatgacgatcggcgactcggtcgtggtgcaattggaccgtattagcggtgaccgctgcaagctgatgattgatgcgccacgtgagatcccggtattgagaggcgaggttctggaacgcaccggcggtgagcgcccttcttgtgttgtggaaggtccgcgttggcatcgtcgcgagatcccgtggaatcgtagcaaggcgcaggcgctcgcggcaatgcgtatgctgctgagcgaaatggatggccgtgattccaacgttcaagccctgcgccgtcagctggaccacatgttcccgccggaaccgggtcgtgagaaaaccgaattaccggcacgtgctagcaacaactaataagaattcctgctgccaccgctgagcaataactagcataaccccttggggcctctaaacgggtcttgaggggttttttgctgaaacctcaggcatttgagaagcacacggtcacactgcttccggtagtcaataaaccggtaaaccagcaatagacataagcggctatttaacgaccctgccctgaaccgacgaccgggtcatcgtggccggatcttgcggcccctcggcttgaacgaattgttagacattatttgccgactaccttggtgatctcgcctttcacgtagtggacaaattcttccaactgatctgcgcgcgaggccaagcgatcttcttcttgtccaagataagcctgtctagcttcaagtatgacgggctgatactgggccggcaggcgctccattgcccagtcggcagcgacatccttcggcgcgattttgccggttactgcgctgtaccaaatgcgggacaacgtaagcactacatttcgctcatcgccagcccagtcgggcggcgagttccatagcgttaaggtttcatttagcgcctcaaatagatcctgttcaggaaccggatcaaagagttcctccgccgctggacctaccaaggcaacgctatgttctcttgcttttgtcagcaagatagccagatcaatgtcgatcgtggctggctcgaagatacctgcaagaatgtcattgcgctgccattctccaaattgcagttcgcgcttagctggataacgccacggaatgatgtcgtcgtgcacaacaatggtgacttctacagcgcggagaatctcgctctctccaggggaagccgaagtttccaaaaggtcgttgatcaaagctcgccgcgttgtttcatcaagccttacggtcaccgtaaccagcaaatcaatatcactgtgtggcttcaggccgccatccactgcggagccgtacaaatgtacggccagcaacgtcggttcgagatggcgctcgatgacgccaactacctctgatagttgagtcgatacttcggcgatcaccgcttccctcatactcttcctttttcaatattattgaagcatttatcagggttattgtctcatgagcggatacatatttgaatgtatttagaaaaataaacaaatagctagctcactcggtcgctacgctccgggcgtgagactgcggcgggcgctgcggacacatacaaagttacccacagattccgtggataagcaggggactaacatgtgaggcaaaacagcagggccgcgccggtggcgtttttccataggctccgccctcctgccagagttcacataaacagacgcttttccggtgcatctgtgggagccgtgaggctcaaccatgaatctgacagtacgggcgaaacccgacaggacttaaagatccccaccgtttccggcgggtcgctccctcttgcgctctcctgttccgaccctgccgtttaccggatacctgttccgcctttctcccttacgggaagtgtggcgctttctcatagctcacacactggtatctcggctcggtgtaggtcgttcgctccaagctgggctgtaagcaagaactccccgttcagcccgactgctgcgccttatccggtaactgttcacttgagtccaacccggaaaagcacggtaaaacgccactggcagcagccattggtaactgggagttcgcagaggatttgtttagctaaacacgcggttgctcttgaagtgtgcgccaaagtccggctacactggaaggacagatttggttgctgtgctctgcgaaagccagttaccacggttaagcagttccccaactgacttaaccttcgatcaaaccacctccccaggtggttttttcgtttacagggcaaaagattacgcgcagaaaaaaaggatctcaagaagatcctttgatcttttctactgaaccgctctagatttcagtgcaatttatctcttcaaatgtagcacctgaagtcagccccatacgatataagttgtaattctcatgttagtcatgccccgcgcccaccggaaggagctgactgggttgaaggctctcaagggcatcggtcgagatcccggtgcctaatgagtgagctaacttacattaattgcgttgcgctcactgcccgctttccagtcgggaaacctgtcgtgccagctgcattaatgaatcggccaacgcgcggggagaggcggtttgcgtattgggcgccagggtggtttttcttttcaccagtgagacgggcaacagctgattgcccttcaccgcctggccctgagagagttgcagcaagcggtccacgctggtttgccccagcaggcgaaaatcctgtttgatggtggttaacggcgggatataacatgagctgtcttcggtatcgtcgtatcccactaccgagatgtccgcaccaacgcgcagcccggactcggtaatggcgcgcattgcgcccagcgccatctgatcgttggcaaccagcatcgcagtgggaacgatgccctcattcagcatttgcatggtttgttgaaaaccggacatggcactccagtcgccttcccgttccgctatcggctgaatttgattgcgagtgagatatttatgccagccagccagacgcagacgcgccgagacagaacttaatgggcccgctaacagcgcgatttgctggtgacccaatgcgaccagatgctccacgcccagtcgcgtaccgtcttcatgggagaaaataatactgttgatgggtgtctggtcagagacatcaagaaataacgccggaacattagtgcaggcagcttccacagcaatggcatcctggtcatccagcggatagttaatgatcagcccactgacgcgttgcgcgagaagattgtgcaccgccgctttacaggcttcgacgccgcttcgttctaccatcgacaccaccacgctggcacccagttgatcggcgcgagatttaatcgccgcgacaatttgcgacggcgcgtgcagggccagactggaggtggcaacgccaatcagcaacgactgtttgcccgccagttgttgtgccacgcggttgggaatgtaattcagctccgccatcgccgcttccactttttcccgcgttttcgcagaaacgtggctggcctggttcaccacgcgggaaacggtctgataagagacaccggcatactctgcgacatcgtataacgttactggtttcac

SEQ ID NO: 5990 - DNA, 5367 bp, synthetic construct
  source 1..5367: mol_type = other DNA
attcaccaccctgaattgactctcttccgggcgctatcatgccataccgcgaaaggttttgcgccattcgatggtgtccgggattgacagctagctcagtcctaggtataatgctagcgtggagatatacctcgagaagcacaattgaaaaagttgcgtttcgttcagcgtttccataaccaggatgttgggaaacgagaagatgtgttcgcacatccaaagccctgcggggcgttccaaacattatgacgatgaaagatcgtcgatgccgtgaagcgcggcttgaagggcggacggaaggatgatcgtgccgccagacaaaaaaggaggaatcctcctcctcgaggcggccgcaataatagactagcataaccccttggggcctctaaacgggtcttgaggggttttttgctgaacgtacgttttacggctagctcagtcctaggtactatgctagcgtggagatatacggtaccaaggaggtaaataatgggagactacaaagaccatgacggtgattataaagatcatgacatcgattacaaggatgacgatgacaagggaggatccggcagcatggcagctaaaaggtcaaagagtgaaacattgcgctacaccaccctgaaggtgcgtttgtacccaagcgctgaacaggcggcgctgtttgaaaagacctttgggtgctgccgttacatctggaatcaaatgttggcggaccagcagcgtttttacatcgaaacggataaattcttcatcccgacaccggctaagtataaagcaggcgccccgtttttgaaggaggtcgacaaccaggcgttaattcaagagcacaataaactgggtcaggcgtttcgcgtttttttcaagtcaccggagaacttcggctacccgaaattcaaacgtaagaaggacgaccgtgacagctttaccgtttgtaatcatgttatgggtaattccgaaacggtgtataccactcgtgatggcctgcgtatgaccaaagcgggtattgtgcgggcaaagttcccgcgtcgtccgcaaggttggtggaaactgaagcgcgtgaccgtggatcgtacccgtagtggtaaatactatggttatatcctgtatgaatgcccggaaaagaagccggaggtggttgtaccgaccccggagactacggtgggtctgaagtacagcatggcgcgtttttatgttgctgataccggcgaaaccgcagacccgccgcattggctgaagcagagccaggagaagctcgctcgcattcaacaacgcctgaaccgcatgcgtccgggttcgaaaaactatcaggaaaccgtccagaaataccgtttgctccacgaacacattgcgaaccaacgtcgtgacttcatacataaggaaagccgtagaatcgccaacgcctgggatgccgtgtgcgttagaggtgatgatatggaacaaatctcccgcattaccaaccgtggcaacgcactggaagcaggttttggcatgttccgcgagtgcctgcgttacaaactggcccgccagggcaaagagctgctggttgtcgaccgttacttcccatccacccgcacgtgcagcgcgtgtggcagagtgatgccggaagagatcagcatgaaaaggcgcacctggacctgcccacaatgtggcgcagttctgaaacgtgaggcgaacgcggcgcgcaatattaaagaccaaggactggcgcagtatttctctacgcgtgagcgcagagagtctgcgtaaggccttaagagaaggagatatacatatgttatgtttgaatctaacacccggagaatacatgacgatcggcgactcggtcgtggtgcaattggaccgtattagcggtgaccgctgcaagctgatgattgatgcgccacgtgagatcccggtattgagaggcgaggttctggaacgcaccggcggtgagcgcccttcttgtgttgtggaaggtccgcgttggcatcgtcgcgagatcccgtggaatcgtagcaaggcgcaggcgctcgcggcaatgcgtatgctgctgagcgaaatggatggccgtgattccaacgttcaagccctgcgccgtcagctggaccacatgttcccgccggaaccgggtcgtgagaaaaccgaattaccggcacgtgctagcaacaactaataagaattcctgctgccaccgctgagcaataactagcataaccccttggggcctctaaacgggtcttgaggggttttttgctgaaacctcaggcatttgagaagcacacggtcacactgcttccggtagtcaataaaccggtaaaccagcaatagacataagcggctatttaacgaccctgccctgaaccgacgaccgggtcatcgtggccggatcttgcggcccctcggcttgaacgaattgttagacattatttgccgactaccttggtgatctcgcctttcacgtagtggacaaattcttccaactgatctgcgcgcgaggccaagcgatcttcttcttgtccaagataagcctgtctagcttcaagtatgacgggctgatactgggccggcaggcgctccattgcccagtcggcagcgacatccttcggcgcgattttgccggttactgcgctgtaccaaatgcgggacaacgtaagcactacatttcgctcatcgccagcccagtcgggcggcgagttccatagcgttaaggtttcatttagcgcctcaaatagatcctgttcaggaaccggatcaaagagttcctccgccgctggacctaccaaggcaacgctatgttctcttgcttttgtcagcaagatagccagatcaatgtcgatcgtggctggctcgaagatacctgcaagaatgtcattgcgctgccattctccaaattgcagttcgcgcttagctggataacgccacggaatgatgtcgtcgtgcacaacaatggtgacttctacagcgcggagaatctcgctctctccaggggaagccgaagtttccaaaaggtcgttgatcaaagctcgccgcgttgtttcatcaagccttacggtcaccgtaaccagcaaatcaatatcactgtgtggcttcaggccgccatccactgcggagccgtacaaatgtacggccagcaacgtcggttcgagatggcgctcgatgacgccaactacctctgatagttgagtcgatacttcggcgatcaccgcttccctcatactcttcctttttcaatattattgaagcatttatcagggttattgtctcatgagcggatacatatttgaatgtatttagaaaaataaacaaatagctagctcactcggtcgctacgctccgggcgtgagactgcggcgggcgctgcggacacatacaaagttacccacagattccgtggataagcaggggactaacatgtgaggcaaaacagcagggccgcgccggtggcgtttttccataggctccgccctcctgccagagttcacataaacagacgcttttccggtgcatctgtgggagccgtgaggctcaaccatgaatctgacagtacgggcgaaacccgacaggacttaaagatccccaccgtttccggcgggtcgctccctcttgcgctctcctgttccgaccctgccgtttaccggatacctgttccgcctttctcccttacgggaagtgtggcgctttctcatagctcacacactggtatctcggctcggtgtaggtcgttcgctccaagctgggctgtaagcaagaactccccgttcagcccgactgctgcgccttatccggtaactgttcacttgagtccaacccggaaaagcacggtaaaacgccactggcagcagccattggtaactgggagttcgcagaggatttgtttagctaaacacgcggttgctcttgaagtgtgcgccaaagtccggctacactggaaggacagatttggttgctgtgctctgcgaaagccagttaccacggttaagcagttccccaactgacttaaccttcgatcaaaccacctccccaggtggttttttcgtttacagggcaaaagattacgcgcagaaaaaaaggatctcaagaagatcctttgatcttttctactgaaccgctctagatttcagtgcaatttatctcttcaaatgtagcacctgaagtcagccccatacgatataagttgtaattctcatgttagtcatgccccgcgcccaccggaaggagctgactgggttgaaggctctcaagggcatcggtcgagatcccggtgcctaatgagtgagctaacttacattaattgcgttgcgctcactgcccgctttccagtcgggaaacctgtcgtgccagctgcattaatgaatcggccaacgcgcggggagaggcggtttgcgtattgggcgccagggtggtttttcttttcaccagtgagacgggcaacagctgattgcccttcaccgcctggccctgagagagttgcagcaagcggtccacgctggtttgccccagcaggcgaaaatcctgtttgatggtggttaacggcgggatataacatgagctgtcttcggtatcgtcgtatcccactaccgagatgtccgcaccaacgcgcagcccggactcggtaatggcgcgcattgcgcccagcgccatctgatcgttggcaaccagcatcgcagtgggaacgatgccctcattcagcatttgcatggtttgttgaaaaccggacatggcactccagtcgccttcccgttccgctatcggctgaatttgattgcgagtgagatatttatgccagccagccagacgcagacgcgccgagacagaacttaatgggcccgctaacagcgcgatttgctggtgacccaatgcgaccagatgctccacgcccagtcgcgtaccgtcttcatgggagaaaataatactgttgatgggtgtctggtcagagacatcaagaaataacgccggaacattagtgcaggcagcttccacagcaatggcatcctggtcatccagcggatagttaatgatcagcccactgacgcgttgcgcgagaagattgtgcaccgccgctttacaggcttcgacgccgcttcgttctaccatcgacaccaccacgctggcacccagttgatcggcgcgagatttaatcgccgcgacaatttgcgacggcgcgtgcagggccagactggaggtggcaacgccaatcagcaacgactgtttgcccgccagttgttgtgccacgcggttgggaatgtaattcagctccgccatcgccgcttccactttttcccgcgttttcgcagaaacgtggctggcctggttcaccacgcgggaaacggtctgataagagacaccggcatactctgcgacatcgtataacgttactggtttcac

SEQ ID NO: 5991 - DNA, 5519 bp, synthetic construct
  source 1..5519: mol_type = other DNA
attcaccaccctgaattgactctcttccgggcgctatcatgccataccgcgaaaggttttgcgccattcgatggtgtccgggattgacagctagctcagtcctaggtataatgctagcgtggagatatacctcgagatgcggcgcggtcctgaaacgggaggcaaatgccgccaggaacatcaaggaccaggggctggcccaatatttcagtacgcgggagcggcgcgaaagcgcgtgaagctctttgtattgtctcagctataccggtcggaacgccggagaaggcccatgcttgcgggaaacgttgagcgaagcacaattgaaaaagttgcgtttcgttcagcgtttccataaccaggatgttgggaaacgagaagatgtgttcgcacatccaaagccctgcggggcgttccaaacattatgacgatgggccggcatggtcccagcctcctcgctggcgccggctgggcaacatgcttcggcatggcgaatgggacgcggccgcaataatagactagcataaccccttggggcctctaaacgggtcttgaggggttttttgctgaacgtacgttttacggctagctcagtcctaggtactatgctagcgtggagatatacggtaccaaggaggtaaataatgggagactacaaagaccatgacggtgattataaagatcatgacatcgattacaaggatgacgatgacaagggaggatccggcagcatggcagctaaaaggtcaaagagtgaaacattgcgctacaccaccctgaaggtgcgtttgtacccaagcgctgaacaggcggcgctgtttgaaaagacctttgggtgctgccgttacatctggaatcaaatgttggcggaccagcagcgtttttacatcgaaacggataaattcttcatcccgacaccggctaagtataaagcaggcgccccgtttttgaaggaggtcgacaaccaggcgttaattcaagagcacaataaactgggtcaggcgtttcgcgtttttttcaagtcaccggagaacttcggctacccgaaattcaaacgtaagaaggacgaccgtgacagctttaccgtttgtaatcatgttatgggtaattccgaaacggtgtataccactcgtgatggcctgcgtatgaccaaagcgggtattgtgcgggcaaagttcccgcgtcgtccgcaaggttggtggaaactgaagcgcgtgaccgtggatcgtacccgtagtggtaaatactatggttatatcctgtatgaatgcccggaaaagaagccggaggtggttgtaccgaccccggagactacggtgggtctgaagtacagcatggcgcgtttttatgttgctgataccggcgaaaccgcagacccgccgcattggctgaagcagagccaggagaagctcgctcgcattcaacaacgcctgaaccgcatgcgtccgggttcgaaaaactatcaggaaaccgtccagaaataccgtttgctccacgaacacattgcgaaccaacgtcgtgacttcatacataaggaaagccgtagaatcgccaacgcctgggatgccgtgtgcgttagaggtgatgatatggaacaaatctcccgcattaccaaccgtggcaacgcactggaagcaggttttggcatgttccgcgagtgcctgcgttacaaactggcccgccagggcaaagagctgctggttgtcgaccgttacttcccatccacccgcacgtgcagcgcgtgtggcagagtgatgccggaagagatcagcatgaaaaggcgcacctggacctgcccacaatgtggcgcagttctgaaacgtgaggcgaacgcggcgcgcaatattaaagaccaaggactggcgcagtatttctctacgcgtgagcgcagagagtctgcgtaaggccttaagagaaggagatatacatatgttatgtttgaatctaacacccggagaatacatgacgatcggcgactcggtcgtggtgcaattggaccgtattagcggtgaccgctgcaagctgatgattgatgcgccacgtgagatcccggtattgagaggcgaggttctggaacgcaccggcggtgagcgcccttcttgtgttgtggaaggtccgcgttggcatcgtcgcgagatcccgtggaatcgtagcaaggcgcaggcgctcgcggcaatgcgtatgctgctgagcgaaatggatggccgtgattccaacgttcaagccctgcgccgtcagctggaccacatgttcccgccggaaccgggtcgtgagaaaaccgaattaccggcacgtgctagcaacaactaataagaattcctgctgccaccgctgagcaataactagcataaccccttggggcctctaaacgggtcttgaggggttttttgctgaaacctcaggcatttgagaagcacacggtcacactgcttccggtagtcaataaaccggtaaaccagcaatagacataagcggctatttaacgaccctgccctgaaccgacgaccgggtcatcgtggccggatcttgcggcccctcggcttgaacgaattgttagacattatttgccgactaccttggtgatctcgcctttcacgtagtggacaaattcttccaactgatctgcgcgcgaggccaagcgatcttcttcttgtccaagataagcctgtctagcttcaagtatgacgggctgatactgggccggcaggcgctccattgcccagtcggcagcgacatccttcggcgcgattttgccggttactgcgctgtaccaaatgcgggacaacgtaagcactacatttcgctcatcgccagcccagtcgggcggcgagttccatagcgttaaggtttcatttagcgcctcaaatagatcctgttcaggaaccggatcaaagagttcctccgccgctggacctaccaaggcaacgctatgttctcttgcttttgtcagcaagatagccagatcaatgtcgatcgtggctggctcgaagatacctgcaagaatgtcattgcgctgccattctccaaattgcagttcgcgcttagctggataacgccacggaatgatgtcgtcgtgcacaacaatggtgacttctacagcgcggagaatctcgctctctccaggggaagccgaagtttccaaaaggtcgttgatcaaagctcgccgcgttgtttcatcaagccttacggtcaccgtaaccagcaaatcaatatcactgtgtggcttcaggccgccatccactgcggagccgtacaaatgtacggccagcaacgtcggttcgagatggcgctcgatgacgccaactacctctgatagttgagtcgatacttcggcgatcaccgcttccctcatactcttcctttttcaatattattgaagcatttatcagggttattgtctcatgagcggatacatatttgaatgtatttagaaaaataaacaaatagctagctcactcggtcgctacgctccgggcgtgagactgcggcgggcgctgcggacacatacaaagttacccacagattccgtggataagcaggggactaacatgtgaggcaaaacagcagggccgcgccggtggcgtttttccataggctccgccctcctgccagagttcacataaacagacgcttttccggtgcatctgtgggagccgtgaggctcaaccatgaatctgacagtacgggcgaaacccgacaggacttaaagatccccaccgtttccggcgggtcgctccctcttgcgctctcctgttccgaccctgccgtttaccggatacctgttccgcctttctcccttacgggaagtgtggcgctttctcatagctcacacactggtatctcggctcggtgtaggtcgttcgctccaagctgggctgtaagcaagaactccccgttcagcccgactgctgcgccttatccggtaactgttcacttgagtccaacccggaaaagcacggtaaaacgccactggcagcagccattggtaactgggagttcgcagaggatttgtttagctaaacacgcggttgctcttgaagtgtgcgccaaagtccggctacactggaaggacagatttggttgctgtgctctgcgaaagccagttaccacggttaagcagttccccaactgacttaaccttcgatcaaaccacctccccaggtggttttttcgtttacagggcaaaagattacgcgcagaaaaaaaggatctcaagaagatcctttgatcttttctactgaaccgctctagatttcagtgcaatttatctcttcaaatgtagcacctgaagtcagccccatacgatataagttgtaattctcatgttagtcatgccccgcgcccaccggaaggagctgactgggttgaaggctctcaagggcatcggtcgagatcccggtgcctaatgagtgagctaacttacattaattgcgttgcgctcactgcccgctttccagtcgggaaacctgtcgtgccagctgcattaatgaatcggccaacgcgcggggagaggcggtttgcgtattgggcgccagggtggtttttcttttcaccagtgagacgggcaacagctgattgcccttcaccgcctggccctgagagagttgcagcaagcggtccacgctggtttgccccagcaggcgaaaatcctgtttgatggtggttaacggcgggatataacatgagctgtcttcggtatcgtcgtatcccactaccgagatgtccgcaccaacgcgcagcccggactcggtaatggcgcgcattgcgcccagcgccatctgatcgttggcaaccagcatcgcagtgggaacgatgccctcattcagcatttgcatggtttgttgaaaaccggacatggcactccagtcgccttcccgttccgctatcggctgaatttgattgcgagtgagatatttatgccagccagccagacgcagacgcgccgagacagaacttaatgggcccgctaacagcgcgatttgctggtgacccaatgcgaccagatgctccacgcccagtcgcgtaccgtcttcatgggagaaaataatactgttgatgggtgtctggtcagagacatcaagaaataacgccggaacattagtgcaggcagcttccacagcaatggcatcctggtcatccagcggatagttaatgatcagcccactgacgcgttgcgcgagaagattgtgcaccgccgctttacaggcttcgacgccgcttcgttctaccatcgacaccaccacgctggcacccagttgatcggcgcgagatttaatcgccgcgacaatttgcgacggcgcgtgcagggccagactggaggtggcaacgccaatcagcaacgactgtttgcccgccagttgttgtgccacgcggttgggaatgtaattcagctccgccatcgccgcttccactttttcccgcgttttcgcagaaacgtggctggcctggttcaccacgcgggaaacggtctgataagagacaccggcatactctgcgacatcgtataacgttactggtttcac

SEQ ID NO: 5992 - DNA, 5343 bp, synthetic construct
  source 1..5343: mol_type = other DNA
attcaccaccctgaattgactctcttccgggcgctatcatgccataccgcgaaaggttttgcgccattcgatggtgtccgggattgacagctagctcagtcctaggtataatgctagcgtggagatatacctcgagaagcacaattgaaaaagttgcgtttcgttcagcgtttccataaccaggatgttgggaaacgagaagatgtgttcgcacatccaaagccctgcggggcgttccaaacattatgacgatgggccggcatggtcccagcctcctcgctggcgccggctgggcaacatgcttcggcatggcgaatgggacgcggccgcaataatagactagcataaccccttggggcctctaaacgggtcttgaggggttttttgctgaacgtacgttttacggctagctcagtcctaggtactatgctagcgtggagatatacggtaccaaggaggtaaataatgggagactacaaagaccatgacggtgattataaagatcatgacatcgattacaaggatgacgatgacaagggaggatccggcagcatggcagctaaaaggtcaaagagtgaaacattgcgctacaccaccctgaaggtgcgtttgtacccaagcgctgaacaggcggcgctgtttgaaaagacctttgggtgctgccgttacatctggaatcaaatgttggcggaccagcagcgtttttacatcgaaacggataaattcttcatcccgacaccggctaagtataaagcaggcgccccgtttttgaaggaggtcgacaaccaggcgttaattcaagagcacaataaactgggtcaggcgtttcgcgtttttttcaagtcaccggagaacttcggctacccgaaattcaaacgtaagaaggacgaccgtgacagctttaccgtttgtaatcatgttatgggtaattccgaaacggtgtataccactcgtgatggcctgcgtatgaccaaagcgggtattgtgcgggcaaagttcccgcgtcgtccgcaaggttggtggaaactgaagcgcgtgaccgtggatcgtacccgtagtggtaaatactatggttatatcctgtatgaatgcccggaaaagaagccggaggtggttgtaccgaccccggagactacggtgggtctgaagtacagcatggcgcgtttttatgttgctgataccggcgaaaccgcagacccgccgcattggctgaagcagagccaggagaagctcgctcgcattcaacaacgcctgaaccgcatgcgtccgggttcgaaaaactatcaggaaaccgtccagaaataccgtttgctccacgaacacattgcgaaccaacgtcgtgacttcatacataaggaaagccgtagaatcgccaacgcctgggatgccgtgtgcgttagaggtgatgatatggaacaaatctcccgcattaccaaccgtggcaacgcactggaagcaggttttggcatgttccgcgagtgcctgcgttacaaactggcccgccagggcaaagagctgctggttgtcgaccgttacttcccatccacccgcacgtgcagcgcgtgtggcagagtgatgccggaagagatcagcatgaaaaggcgcacctggacctgcccacaatgtggcgcagttctgaaacgtgaggcgaacgcggcgcgcaatattaaagaccaaggactggcgcagtatttctctacgcgtgagcgcagagagtctgcgtaaggccttaagagaaggagatatacatatgttatgtttgaatctaacacccggagaatacatgacgatcggcgactcggtcgtggtgcaattggaccgtattagcggtgaccgctgcaagctgatgattgatgcgccacgtgagatcccggtattgagaggcgaggttctggaacgcaccggcggtgagcgcccttcttgtgttgtggaaggtccgcgttggcatcgtcgcgagatcccgtggaatcgtagcaaggcgcaggcgctcgcggcaatgcgtatgctgctgagcgaaatggatggccgtgattccaacgttcaagccctgcgccgtcagctggaccacatgttcccgccggaaccgggtcgtgagaaaaccgaattaccggcacgtgctagcaacaactaataagaattcctgctgccaccgctgagcaataactagcataaccccttggggcctctaaacgggtcttgaggggttttttgctgaaacctcaggcatttgagaagcacacggtcacactgcttccggtagtcaataaaccggtaaaccagcaatagacataagcggctatttaacgaccctgccctgaaccgacgaccgggtcatcgtggccggatcttgcggcccctcggcttgaacgaattgttagacattatttgccgactaccttggtgatctcgcctttcacgtagtggacaaattcttccaactgatctgcgcgcgaggccaagcgatcttcttcttgtccaagataagcctgtctagcttcaagtatgacgggctgatactgggccggcaggcgctccattgcccagtcggcagcgacatccttcggcgcgattttgccggttactgcgctgtaccaaatgcgggacaacgtaagcactacatttcgctcatcgccagcccagtcgggcggcgagttccatagcgttaaggtttcatttagcgcctcaaatagatcctgttcaggaaccggatcaaagagttcctccgccgctggacctaccaaggcaacgctatgttctcttgcttttgtcagcaagatagccagatcaatgtcgatcgtggctggctcgaagatacctgcaagaatgtcattgcgctgccattctccaaattgcagttcgcgcttagctggataacgccacggaatgatgtcgtcgtgcacaacaatggtgacttctacagcgcggagaatctcgctctctccaggggaagccgaagtttccaaaaggtcgttgatcaaagctcgccgcgttgtttcatcaagccttacggtcaccgtaaccagcaaatcaatatcactgtgtggcttcaggccgccatccactgcggagccgtacaaatgtacggccagcaacgtcggttcgagatggcgctcgatgacgccaactacctctgatagttgagtcgatacttcggcgatcaccgcttccctcatactcttcctttttcaatattattgaagcatttatcagggttattgtctcatgagcggatacatatttgaatgtatttagaaaaataaacaaatagctagctcactcggtcgctacgctccgggcgtgagactgcggcgggcgctgcggacacatacaaagttacccacagattccgtggataagcaggggactaacatgtgaggcaaaacagcagggccgcgccggtggcgtttttccataggctccgccctcctgccagagttcacataaacagacgcttttccggtgcatctgtgggagccgtgaggctcaaccatgaatctgacagtacgggcgaaacccgacaggacttaaagatccccaccgtttccggcgggtcgctccctcttgcgctctcctgttccgaccctgccgtttaccggatacctgttccgcctttctcccttacgggaagtgtggcgctttctcatagctcacacactggtatctcggctcggtgtaggtcgttcgctccaagctgggctgtaagcaagaactccccgttcagcccgactgctgcgccttatccggtaactgttcacttgagtccaacccggaaaagcacggtaaaacgccactggcagcagccattggtaactgggagttcgcagaggatttgtttagctaaacacgcggttgctcttgaagtgtgcgccaaagtccggctacactggaaggacagatttggttgctgtgctctgcgaaagccagttaccacggttaagcagttccccaactgacttaaccttcgatcaaaccacctccccaggtggttttttcgtttacagggcaaaagattacgcgcagaaaaaaaggatctcaagaagatcctttgatcttttctactgaaccgctctagatttcagtgcaatttatctcttcaaatgtagcacctgaagtcagccccatacgatataagttgtaattctcatgttagtcatgccccgcgcccaccggaaggagctgactgggttgaaggctctcaagggcatcggtcgagatcccggtgcctaatgagtgagctaacttacattaattgcgttgcgctcactgcccgctttccagtcgggaaacctgtcgtgccagctgcattaatgaatcggccaacgcgcggggagaggcggtttgcgtattgggcgccagggtggtttttcttttcaccagtgagacgggcaacagctgattgcccttcaccgcctggccctgagagagttgcagcaagcggtccacgctggtttgccccagcaggcgaaaatcctgtttgatggtggttaacggcgggatataacatgagctgtcttcggtatcgtcgtatcccactaccgagatgtccgcaccaacgcgcagcccggactcggtaatggcgcgcattgcgcccagcgccatctgatcgttggcaaccagcatcgcagtgggaacgatgccctcattcagcatttgcatggtttgttgaaaaccggacatggcactccagtcgccttcccgttccgctatcggctgaatttgattgcgagtgagatatttatgccagccagccagacgcagacgcgccgagacagaacttaatgggcccgctaacagcgcgatttgctggtgacccaatgcgaccagatgctccacgcccagtcgcgtaccgtcttcatgggagaaaataatactgttgatgggtgtctggtcagagacatcaagaaataacgccggaacattagtgcaggcagcttccacagcaatggcatcctggtcatccagcggatagttaatgatcagcccactgacgcgttgcgcgagaagattgtgcaccgccgctttacaggcttcgacgccgcttcgttctaccatcgacaccaccacgctggcacccagttgatcggcgcgagatttaatcgccgcgacaatttgcgacggcgcgtgcagggccagactggaggtggcaacgccaatcagcaacgactgtttgcccgccagttgttgtgccacgcggttgggaatgtaattcagctccgccatcgccgcttccactttttcccgcgttttcgcagaaacgtggctggcctggttcaccacgcgggaaacggtctgataagagacaccggcatactctgcgacatcgtataacgttactggtttcac

SEQ ID NO: 5993 - DNA, 5131 bp, synthetic construct
  source 1..5131: mol_type = other DNA
attcaccaccctgaattgactctcttccgggcgctatcatgccataccgcgaaaggttttgcgccattcgatggtgtccgggattgacagctagctcagtcctaggtataatgctagcgtggagatatacctcgagatgcggcgcggtcctgaaacgggaggcaaatgccgccaggaacatcaaggaccaggggctggcccaatatttcagtacgcgggagcggcgcgaaagcgcgtgaagctctttgtattgtctcagctataccggtcggaacgccggagaaggcccatgcttgcgggaaacgttgatcagcgtttccataaccaggatgttgggaaacgagaagatgtgttcgcacatccaaagccctgcggggcgttccaaacattatgacgatgaaagatcgtcgatgccgtgaagcgcggcttgaagggcggacggaaggatgatcgtgccgccagacaaaaaaggaggaatcctcctcctcgaggcggccgcaataatagactagcataaccccttggggcctctaaacgggtcttgaggggttttttgctgaacgtacgttttacggctagctcagtcctaggtactatgctagcgtggagatatacggtaccaaggaggtaaataatgggagactacaaagaccatgacggtgattataaagatcatgacatcgattacaaggatgacgatgacaagggaggatccggcagcatggcagctaaaaggtcaaagagtgaaacattgcgctacaccaccctgaaggtgcgtttgtacccaagcgctgaacaggcggcgctgtttgaaaagacctttgggtgctgccgttacatctggaatcaaatgttggcggaccagcagcgtttttacatcgaaacggataaattcttcatcccgacaccggctaagtataaagcaggcgccccgtttttgaaggaggtcgacaaccaggcgttaattcaagagcacaataaactgggtcaggcgtttcgcgtttttttcaagtcaccggagaacttcggctacccgaaattcaaacgtaagaaggacgaccgtgacagctttaccgtttgtaatcatgttatgggtaattccgaaacggtgtataccactcgtgatggcctgcgtatgaccaaagcgggtattgtgcgggcaaagttcccgcgtcgtccgcaaggttggtggaaactgaagcgcgtgaccgtggatcgtacccgtagtggtaaatactatggttatatcctgtatgaatgcccggaaaagaagccggaggtggttgtaccgaccccggagactacggtgggtctgaagtacagcatggcgcgtttttatgttgctgataccggcgaaaccgcagacccgccgcattggctgaagcagagccaggagaagctcgctcgcattcaacaacgcctgaaccgcatgcgtccgggttcgaaaaactatcaggaaaccgtccagaaataccgtttgctccacgaacacattgcgaaccaacgtcgtgacttcatacataaggaaagccgtagaatcgccaacgcctgggatgccgtgtgcgttagaggtgatgatatggaacaaatctcccgcattaccaaccgtggcaacgcactggaagcaggttttggcatgttccgcgagtgcctgcgttacaaactggcccgccagggcaaagagctgctggttgtcgaccgttacttcccatccacccgcacgtgcagcgcgtgtggcagagtgatgccggaagagatcagcatgaaaaggcgcacctggacctgcccacaatgtggcgcagttctgaaacgtgaggcgaacgcggcgcgcaatattaaagaccaaggactggcgcagtatttctctacgcgtgagcgcagagagtctgcgtaaggccttaagagaaggagatatacattaagaattcctgctgccaccgctgagcaataactagcataaccccttggggcctctaaacgggtcttgaggggttttttgctgaaacctcaggcatttgagaagcacacggtcacactgcttccggtagtcaataaaccggtaaaccagcaatagacataagcggctatttaacgaccctgccctgaaccgacgaccgggtcatcgtggccggatcttgcggcccctcggcttgaacgaattgttagacattatttgccgactaccttggtgatctcgcctttcacgtagtggacaaattcttccaactgatctgcgcgcgaggccaagcgatcttcttcttgtccaagataagcctgtctagcttcaagtatgacgggctgatactgggccggcaggcgctccattgcccagtcggcagcgacatccttcggcgcgattttgccggttactgcgctgtaccaaatgcgggacaacgtaagcactacatttcgctcatcgccagcccagtcgggcggcgagttccatagcgttaaggtttcatttagcgcctcaaatagatcctgttcaggaaccggatcaaagagttcctccgccgctggacctaccaaggcaacgctatgttctcttgcttttgtcagcaagatagccagatcaatgtcgatcgtggctggctcgaagatacctgcaagaatgtcattgcgctgccattctccaaattgcagttcgcgcttagctggataacgccacggaatgatgtcgtcgtgcacaacaatggtgacttctacagcgcggagaatctcgctctctccaggggaagccgaagtttccaaaaggtcgttgatcaaagctcgccgcgttgtttcatcaagccttacggtcaccgtaaccagcaaatcaatatcactgtgtggcttcaggccgccatccactgcggagccgtacaaatgtacggccagcaacgtcggttcgagatggcgctcgatgacgccaactacctctgatagttgagtcgatacttcggcgatcaccgcttccctcatactcttcctttttcaatattattgaagcatttatcagggttattgtctcatgagcggatacatatttgaatgtatttagaaaaataaacaaatagctagctcactcggtcgctacgctccgggcgtgagactgcggcgggcgctgcggacacatacaaagttacccacagattccgtggataagcaggggactaacatgtgaggcaaaacagcagggccgcgccggtggcgtttttccataggctccgccctcctgccagagttcacataaacagacgcttttccggtgcatctgtgggagccgtgaggctcaaccatgaatctgacagtacgggcgaaacccgacaggacttaaagatccccaccgtttccggcgggtcgctccctcttgcgctctcctgttccgaccctgccgtttaccggatacctgttccgcctttctcccttacgggaagtgtggcgctttctcatagctcacacactggtatctcggctcggtgtaggtcgttcgctccaagctgggctgtaagcaagaactccccgttcagcccgactgctgcgccttatccggtaactgttcacttgagtccaacccggaaaagcacggtaaaacgccactggcagcagccattggtaactgggagttcgcagaggatttgtttagctaaacacgcggttgctcttgaagtgtgcgccaaagtccggctacactggaaggacagatttggttgctgtgctctgcgaaagccagttaccacggttaagcagttccccaactgacttaaccttcgatcaaaccacctccccaggtggttttttcgtttacagggcaaaagattacgcgcagaaaaaaaggatctcaagaagatcctttgatcttttctactgaaccgctctagatttcagtgcaatttatctcttcaaatgtagcacctgaagtcagccccatacgatataagttgtaattctcatgttagtcatgccccgcgcccaccggaaggagctgactgggttgaaggctctcaagggcatcggtcgagatcccggtgcctaatgagtgagctaacttacattaattgcgttgcgctcactgcccgctttccagtcgggaaacctgtcgtgccagctgcattaatgaatcggccaacgcgcggggagaggcggtttgcgtattgggcgccagggtggtttttcttttcaccagtgagacgggcaacagctgattgcccttcaccgcctggccctgagagagttgcagcaagcggtccacgctggtttgccccagcaggcgaaaatcctgtttgatggtggttaacggcgggatataacatgagctgtcttcggtatcgtcgtatcccactaccgagatgtccgcaccaacgcgcagcccggactcggtaatggcgcgcattgcgcccagcgccatctgatcgttggcaaccagcatcgcagtgggaacgatgccctcattcagcatttgcatggtttgttgaaaaccggacatggcactccagtcgccttcccgttccgctatcggctgaatttgattgcgagtgagatatttatgccagccagccagacgcagacgcgccgagacagaacttaatgggcccgctaacagcgcgatttgctggtgacccaatgcgaccagatgctccacgcccagtcgcgtaccgtcttcatgggagaaaataatactgttgatgggtgtctggtcagagacatcaagaaataacgccggaacattagtgcaggcagcttccacagcaatggcatcctggtcatccagcggatagttaatgatcagcccactgacgcgttgcgcgagaagattgtgcaccgccgctttacaggcttcgacgccgcttcgttctaccatcgacaccaccacgctggcacccagttgatcggcgcgagatttaatcgccgcgacaatttgcgacggcgcgtgcagggccagactggaggtggcaacgccaatcagcaacgactgtttgcccgccagttgttgtgccacgcggttgggaatgtaattcagctccgccatcgccgcttccactttttcccgcgttttcgcagaaacgtggctggcctggttcaccacgcgggaaacggtctgataagagacaccggcatactctgcgacatcgtataacgttactggtttcac

SEQ ID NO: 5994 - DNA, 5543 bp, synthetic construct
  source 1..5543: mol_type = other DNA
attcaccaccctgaattgactctcttccgggcgctatcatgccataccgcgaaaggttttgcgccattcgatggtgtccgggattgacagctagctcagtcctaggtataatgctagcgtggagatatacctcgagatgcggcgcggtcctgaaacgggaggcaaatgccgccaggaacatcaaggaccaggggctggcccaatatttcagtacgcgggagcggcgcgaaagcgcgtgaagctctttgtattgtctcagctataccggtcggaacgccggagaaggcccatgcttgcgggaaacgttgagcgaagcacaattgaaaaagttgcgtttcgttcagcgtttccataaccaggatgttgggaaacgagaagatgtgttcgcacatccaaagccctgcggggcgttccaaacattatgacgatgaaagatcgtcgatgccgtgaagcgcggcttgaagggcggacggaaggatgatcgtgccgccagacaaaaaaggaggaatcctcctcctcgaggcggccgcaataatagactagcataaccccttggggcctctaaacgggtcttgaggggttttttgctgaacgtacgttttacggctagctcagtcctaggtactatgctagcgtggagatatacggtaccaaggaggtaaataatggcagctaaaaggtcaaagagtgaaacattgcgctacaccaccctgaaggtgcgtttgtacccaagcgctgaacaggcggcgctgtttgaaaagacctttgggtgctgccgttacatctggaatcaaatgttggcggaccagcagcgtttttacatcgaaacggataaattcttcatcccgacaccggctaagtataaagcaggcgccccgtttttgaaggaggtcgacaaccaggcgttaattcaagagcacaataaactgggtcaggcgtttcgcgtttttttcaagtcaccggagaacttcggctacccgaaattcaaacgtaagaaggacgaccgtgacagctttaccgtttgtaatcatgttatgggtaattccgaaacggtgtataccactcgtgatggcctgcgtatgaccaaagcgggtattgtgcgggcaaagttcccgcgtcgtccgcaaggttggtggaaactgaagcgcgtgaccgtggatcgtacccgtagtggtaaatactatggttatatcctgtatgaatgcccggaaaagaagccggaggtggttgtaccgaccccggagactacggtgggtctgaagtacagcatggcgcgtttttatgttgctgataccggcgaaaccgcagacccgccgcattggctgaagcagagccaggagaagctcgctcgcattcaacaacgcctgaaccgcatgcgtccgggttcgaaaaactatcaggaaaccgtccagaaataccgtttgctccacgaacacattgcgaaccaacgtcgtgacttcatacataaggaaagccgtagaatcgccaacgcctgggatgccgtgtgcgttagaggtgatgatatggaacaaatctcccgcattaccaaccgtggcaacgcactggaagcaggttttggcatgttccgcgagtgcctgcgttacaaactggcccgccagggcaaagagctgctggttgtcgaccgttacttcccatccacccgcacgtgcagcgcgtgtggcagagtgatgccggaagagatcagcatgaaaaggcgcacctggacctgcccacaatgtggcgcagttctgaaacgtgaggcgaacgcggcgcgcaatattaaagaccaaggactggcgcagtatttctctacgcgtgagcgcagagagtctgcgtaaggccttaagagaaggagatatacatatgggagactacaaagaccatgacggtgattataaagatcatgacatcgattacaaggatgacgatgacaagggaggatccggcagcatgttatgtttgaatctaacacccggagaatacatgacgatcggcgactcggtcgtggtgcaattggaccgtattagcggtgaccgctgcaagctgatgattgatgcgccacgtgagatcccggtattgagaggcgaggttctggaacgcaccggcggtgagcgcccttcttgtgttgtggaaggtccgcgttggcatcgtcgcgagatcccgtggaatcgtagcaaggcgcaggcgctcgcggcaatgcgtatgctgctgagcgaaatggatggccgtgattccaacgttcaagccctgcgccgtcagctggaccacatgttcccgccggaaccgggtcgtgagaaaaccgaattaccggcacgtgctagcaacaactaataagaattcctgctgccaccgctgagcaataactagcataaccccttggggcctctaaacgggtcttgaggggttttttgctgaaacctcaggcatttgagaagcacacggtcacactgcttccggtagtcaataaaccggtaaaccagcaatagacataagcggctatttaacgaccctgccctgaaccgacgaccgggtcatcgtggccggatcttgcggcccctcggcttgaacgaattgttagacattatttgccgactaccttggtgatctcgcctttcacgtagtggacaaattcttccaactgatctgcgcgcgaggccaagcgatcttcttcttgtccaagataagcctgtctagcttcaagtatgacgggctgatactgggccggcaggcgctccattgcccagtcggcagcgacatccttcggcgcgattttgccggttactgcgctgtaccaaatgcgggacaacgtaagcactacatttcgctcatcgccagcccagtcgggcggcgagttccatagcgttaaggtttcatttagcgcctcaaatagatcctgttcaggaaccggatcaaagagttcctccgccgctggacctaccaaggcaacgctatgttctcttgcttttgtcagcaagatagccagatcaatgtcgatcgtggctggctcgaagatacctgcaagaatgtcattgcgctgccattctccaaattgcagttcgcgcttagctggataacgccacggaatgatgtcgtcgtgcacaacaatggtgacttctacagcgcggagaatctcgctctctccaggggaagccgaagtttccaaaaggtcgttgatcaaagctcgccgcgttgtttcatcaagccttacggtcaccgtaaccagcaaatcaatatcactgtgtggcttcaggccgccatccactgcggagccgtacaaatgtacggccagcaacgtcggttcgagatggcgctcgatgacgccaactacctctgatagttgagtcgatacttcggcgatcaccgcttccctcatactcttcctttttcaatattattgaagcatttatcagggttattgtctcatgagcggatacatatttgaatgtatttagaaaaataaacaaatagctagctcactcggtcgctacgctccgggcgtgagactgcggcgggcgctgcggacacatacaaagttacccacagattccgtggataagcaggggactaacatgtgaggcaaaacagcagggccgcgccggtggcgtttttccataggctccgccctcctgccagagttcacataaacagacgcttttccggtgcatctgtgggagccgtgaggctcaaccatgaatctgacagtacgggcgaaacccgacaggacttaaagatccccaccgtttccggcgggtcgctccctcttgcgctctcctgttccgaccctgccgtttaccggatacctgttccgcctttctcccttacgggaagtgtggcgctttctcatagctcacacactggtatctcggctcggtgtaggtcgttcgctccaagctgggctgtaagcaagaactccccgttcagcccgactgctgcgccttatccggtaactgttcacttgagtccaacccggaaaagcacggtaaaacgccactggcagcagccattggtaactgggagttcgcagaggatttgtttagctaaacacgcggttgctcttgaagtgtgcgccaaagtccggctacactggaaggacagatttggttgctgtgctctgcgaaagccagttaccacggttaagcagttccccaactgacttaaccttcgatcaaaccacctccccaggtggttttttcgtttacagggcaaaagattacgcgcagaaaaaaaggatctcaagaagatcctttgatcttttctactgaaccgctctagatttcagtgcaatttatctcttcaaatgtagcacctgaagtcagccccatacgatataagttgtaattctcatgttagtcatgccccgcgcccaccggaaggagctgactgggttgaaggctctcaagggcatcggtcgagatcccggtgcctaatgagtgagctaacttacattaattgcgttgcgctcactgcccgctttccagtcgggaaacctgtcgtgccagctgcattaatgaatcggccaacgcgcggggagaggcggtttgcgtattgggcgccagggtggtttttcttttcaccagtgagacgggcaacagctgattgcccttcaccgcctggccctgagagagttgcagcaagcggtccacgctggtttgccccagcaggcgaaaatcctgtttgatggtggttaacggcgggatataacatgagctgtcttcggtatcgtcgtatcccactaccgagatgtccgcaccaacgcgcagcccggactcggtaatggcgcgcattgcgcccagcgccatctgatcgttggcaaccagcatcgcagtgggaacgatgccctcattcagcatttgcatggtttgttgaaaaccggacatggcactccagtcgccttcccgttccgctatcggctgaatttgattgcgagtgagatatttatgccagccagccagacgcagacgcgccgagacagaacttaatgggcccgctaacagcgcgatttgctggtgacccaatgcgaccagatgctccacgcccagtcgcgtaccgtcttcatgggagaaaataatactgttgatgggtgtctggtcagagacatcaagaaataacgccggaacattagtgcaggcagcttccacagcaatggcatcctggtcatccagcggatagttaatgatcagcccactgacgcgttgcgcgagaagattgtgcaccgccgctttacaggcttcgacgccgcttcgttctaccatcgacaccaccacgctggcacccagttgatcggcgcgagatttaatcgccgcgacaatttgcgacggcgcgtgcagggccagactggaggtggcaacgccaatcagcaacgactgtttgcccgccagttgttgtgccacgcggttgggaatgtaattcagctccgccatcgccgcttccactttttcccgcgttttcgcagaaacgtggctggcctggttcaccacgcgggaaacggtctgataagagacaccggcatactctgcgacatcgtataacgttactggtttcac

SEQ ID NO: 5995 - DNA, 4345 bp, synthetic construct
  source 1..4345: mol_type = other DNA
attcaccaccctgaattgactctcttccgggcgctatcatgccataccgcgaaaggttttgcgccattcgatggtgtccgggattgacagctagctcagtcctaggtataatgctagcgtggagatatacctcgagatgcggcgcggtcctgaaacgggaggcaaatgccgccaggaacatcaaggaccaggggctggcccaatatttcagtacgcgggagcggcgcgaaagcgcgtgaagctctttgtattgtctcagctataccggtcggaacgccggagaaggcccatgcttgcgggaaacgttgagcgaagcacaattgaaaaagttgcgtttcgttcagcgtttccataaccaggatgttgggaaacgagaagatgtgttcgcacatccaaagccctgcggggcgttccaaacattatgacgatgaaagatcgtcgatgccgtgaagcgcggcttgaagggcggacggaaggatgatcgtgccgccagacaaaaaaggaggaatcctcctcctcgaggcggccgcaataatagactagcataaccccttggggcctctaaacgggtcttgaggggttttttgctgaacgtacgttttacggctagctcagtcctaggtactatgctagcgtggagatatacggtaccaaggaggtaaataatgggagactacaaagaccatgacggtgattataaagatcatgacatcgattacaaggatgacgatgacaagggaggatccggcagcatgttatgtttgaatctaacacccggagaatacatgacgatcggcgactcggtcgtggtgcaattggaccgtattagcggtgaccgctgcaagctgatgattgatgcgccacgtgagatcccggtattgagaggcgaggttctggaacgcaccggcggtgagcgcccttcttgtgttgtggaaggtccgcgttggcatcgtcgcgagatcccgtggaatcgtagcaaggcgcaggcgctcgcggcaatgcgtatgctgctgagcgaaatggatggccgtgattccaacgttcaagccctgcgccgtcagctggaccacatgttcccgccggaaccgggtcgtgagaaaaccgaattaccggcacgtgctagcaacaactaataagaattcctgctgccaccgctgagcaataactagcataaccccttggggcctctaaacgggtcttgaggggttttttgctgaaacctcaggcatttgagaagcacacggtcacactgcttccggtagtcaataaaccggtaaaccagcaatagacataagcggctatttaacgaccctgccctgaaccgacgaccgggtcatcgtggccggatcttgcggcccctcggcttgaacgaattgttagacattatttgccgactaccttggtgatctcgcctttcacgtagtggacaaattcttccaactgatctgcgcgcgaggccaagcgatcttcttcttgtccaagataagcctgtctagcttcaagtatgacgggctgatactgggccggcaggcgctccattgcccagtcggcagcgacatccttcggcgcgattttgccggttactgcgctgtaccaaatgcgggacaacgtaagcactacatttcgctcatcgccagcccagtcgggcggcgagttccatagcgttaaggtttcatttagcgcctcaaatagatcctgttcaggaaccggatcaaagagttcctccgccgctggacctaccaaggcaacgctatgttctcttgcttttgtcagcaagatagccagatcaatgtcgatcgtggctggctcgaagatacctgcaagaatgtcattgcgctgccattctccaaattgcagttcgcgcttagctggataacgccacggaatgatgtcgtcgtgcacaacaatggtgacttctacagcgcggagaatctcgctctctccaggggaagccgaagtttccaaaaggtcgttgatcaaagctcgccgcgttgtttcatcaagccttacggtcaccgtaaccagcaaatcaatatcactgtgtggcttcaggccgccatccactgcggagccgtacaaatgtacggccagcaacgtcggttcgagatggcgctcgatgacgccaactacctctgatagttgagtcgatacttcggcgatcaccgcttccctcatactcttcctttttcaatattattgaagcatttatcagggttattgtctcatgagcggatacatatttgaatgtatttagaaaaataaacaaatagctagctcactcggtcgctacgctccgggcgtgagactgcggcgggcgctgcggacacatacaaagttacccacagattccgtggataagcaggggactaacatgtgaggcaaaacagcagggccgcgccggtggcgtttttccataggctccgccctcctgccagagttcacataaacagacgcttttccggtgcatctgtgggagccgtgaggctcaaccatgaatctgacagtacgggcgaaacccgacaggacttaaagatccccaccgtttccggcgggtcgctccctcttgcgctctcctgttccgaccctgccgtttaccggatacctgttccgcctttctcccttacgggaagtgtggcgctttctcatagctcacacactggtatctcggctcggtgtaggtcgttcgctccaagctgggctgtaagcaagaactccccgttcagcccgactgctgcgccttatccggtaactgttcacttgagtccaacccggaaaagcacggtaaaacgccactggcagcagccattggtaactgggagttcgcagaggatttgtttagctaaacacgcggttgctcttgaagtgtgcgccaaagtccggctacactggaaggacagatttggttgctgtgctctgcgaaagccagttaccacggttaagcagttccccaactgacttaaccttcgatcaaaccacctccccaggtggttttttcgtttacagggcaaaagattacgcgcagaaaaaaaggatctcaagaagatcctttgatcttttctactgaaccgctctagatttcagtgcaatttatctcttcaaatgtagcacctgaagtcagccccatacgatataagttgtaattctcatgttagtcatgccccgcgcccaccggaaggagctgactgggttgaaggctctcaagggcatcggtcgagatcccggtgcctaatgagtgagctaacttacattaattgcgttgcgctcactgcccgctttccagtcgggaaacctgtcgtgccagctgcattaatgaatcggccaacgcgcggggagaggcggtttgcgtattgggcgccagggtggtttttcttttcaccagtgagacgggcaacagctgattgcccttcaccgcctggccctgagagagttgcagcaagcggtccacgctggtttgccccagcaggcgaaaatcctgtttgatggtggttaacggcgggatataacatgagctgtcttcggtatcgtcgtatcccactaccgagatgtccgcaccaacgcgcagcccggactcggtaatggcgcgcattgcgcccagcgccatctgatcgttggcaaccagcatcgcagtgggaacgatgccctcattcagcatttgcatggtttgttgaaaaccggacatggcactccagtcgccttcccgttccgctatcggctgaatttgattgcgagtgagatatttatgccagccagccagacgcagacgcgccgagacagaacttaatgggcccgctaacagcgcgatttgctggtgacccaatgcgaccagatgctccacgcccagtcgcgtaccgtcttcatgggagaaaataatactgttgatgggtgtctggtcagagacatcaagaaataacgccggaacattagtgcaggcagcttccacagcaatggcatcctggtcatccagcggatagttaatgatcagcccactgacgcgttgcgcgagaagattgtgcaccgccgctttacaggcttcgacgccgcttcgttctaccatcgacaccaccacgctggcacccagttgatcggcgcgagatttaatcgccgcgacaatttgcgacggcgcgtgcagggccagactggaggtggcaacgccaatcagcaacgactgtttgcccgccagttgttgtgccacgcggttgggaatgtaattcagctccgccatcgccgcttccactttttcccgcgttttcgcagaaacgtggctggcctggttcaccacgcgggaaacggtctgataagagacaccggcatactctgcgacatcgtataacgttactggtttcac

SEQ ID NO: 5996 - DNA, 5603 bp, synthetic construct
  source 1..5603: mol_type = other DNA
attcaccaccctgaattgactctcttccgggcgctatcatgccataccgcgaaaggttttgcgccattcgatggtgtccgggattgacagctagctcagtcctaggtataatgctagcgtggagatatacctcgagatgcggcgcggtcctgaaacgggaggcaaatgccgccaggaacatcaaggaccaggggctggcccaatatttcagtacgcgggagcggcgcgaaagcgcgtgaagctctttgtattgtctcagctataccggtcggaacgccggagaaggcccatgcttgcgggaaacgttgagcgaagcacaattgaaaaagttgcgtttcgttcagcgtttccataaccaggatgttgggaaacgagaagatgtgttcgcacatccaaagccctgcggggcgttccaaacattatgacgatgaaagatcgtcgatgccgtgaagcgcggcttgaagggcggacggaaggatgatcgtgccgccagacaaaaaaggaggaatcctcctcctcgaggcggccgcaataatagactagcataaccccttggggcctctaaacgggtcttgaggggttttttgctgaacgtacgttttacggctagctcagtcctaggtactatgctagcgtggagatatacggtaccaaggaggtaaataatgggagactacaaagaccatgacggtgattataaagatcatgacatcgattacaaggatgacgatgacaagggaggatccggcagcatggcagctaaaaggtcaaagagtgaaacattgcgctacaccaccctgaaggtgcgtttgtacccaagcgctgaacaggcggcgctgtttgaaaagacctttgggtgctgccgttacatctggaatcaaatgttggcggaccagcagcgtttttacatcgaaacggataaattcttcatcccgacaccggctaagtataaagcaggcgccccgtttttgaaggaggtcgacaaccaggcgttaattcaagagcacaataaactgggtcaggcgtttcgcgtttttttcaagtcaccggagaacttcggctacccgaaattcaaacgtaagaaggacgaccgtgacagctttaccgtttgtaatcatgttatgggtaattccgaaacggtgtataccactcgtgatggcctgcgtatgaccaaagcgggtattgtgcgggcaaagttcccgcgtcgtccgcaaggttggtggaaactgaagcgcgtgaccgtggatcgtacccgtagtggtaaatactatggttatatcctgtatgaatgcccggaaaagaagccggaggtggttgtaccgaccccggagactacggtgggtctgaagtacagcatggcgcgtttttatgttgctgataccggcgaaaccgcagacccgccgcattggctgaagcagagccaggagaagctcgctcgcattcaacaacgcctgaaccgcatgcgtccgggttcgaaaaactatcaggaaaccgtccagaaataccgtttgctccacgaacacattgcgaaccaacgtcgtgacttcatacataaggaaagccgtagaatcgccaacgcctgggatgccgtgtgcgttagaggtgatgatatggaacaaatctcccgcattaccaaccgtggcaacgcactggaagcaggttttggcatgttccgcgagtgcctgcgttacaaactggcccgccagggcaaagagctgctggttgtcgaccgttacttcccatccacccgcacgtgcagcgcgtgtggcagagtgatgccggaagagatcagcatgaaaaggcgcacctggacctgcccacaatgtggcgcagttctgaaacgtgaggcgaacgcggcgcgcaatattaaagaccaaggactggcgcagtatttctctacgcgtgagcgcagagagtctgcgtaaggccttaagagaaggagatatacatatggggaaacctataccaaatcccttactaggactggacagcaccggaggatccggcagcatgttatgtttgaatctaacacccggagaatacatgacgatcggcgactcggtcgtggtgcaattggaccgtattagcggtgaccgctgcaagctgatgattgatgcgccacgtgagatcccggtattgagaggcgaggttctggaacgcaccggcggtgagcgcccttcttgtgttgtggaaggtccgcgttggcatcgtcgcgagatcccgtggaatcgtagcaaggcgcaggcgctcgcggcaatgcgtatgctgctgagcgaaatggatggccgtgattccaacgttcaagccctgcgccgtcagctggaccacatgttcccgccggaaccgggtcgtgagaaaaccgaattaccggcacgtgctagcaacaactaataagaattcctgctgccaccgctgagcaataactagcataaccccttggggcctctaaacgggtcttgaggggttttttgctgaaacctcaggcatttgagaagcacacggtcacactgcttccggtagtcaataaaccggtaaaccagcaatagacataagcggctatttaacgaccctgccctgaaccgacgaccgggtcatcgtggccggatcttgcggcccctcggcttgaacgaattgttagacattatttgccgactaccttggtgatctcgcctttcacgtagtggacaaattcttccaactgatctgcgcgcgaggccaagcgatcttcttcttgtccaagataagcctgtctagcttcaagtatgacgggctgatactgggccggcaggcgctccattgcccagtcggcagcgacatccttcggcgcgattttgccggttactgcgctgtaccaaatgcgggacaacgtaagcactacatttcgctcatcgccagcccagtcgggcggcgagttccatagcgttaaggtttcatttagcgcctcaaatagatcctgttcaggaaccggatcaaagagttcctccgccgctggacctaccaaggcaacgctatgttctcttgcttttgtcagcaagatagccagatcaatgtcgatcgtggctggctcgaagatacctgcaagaatgtcattgcgctgccattctccaaattgcagttcgcgcttagctggataacgccacggaatgatgtcgtcgtgcacaacaatggtgacttctacagcgcggagaatctcgctctctccaggggaagccgaagtttccaaaaggtcgttgatcaaagctcgccgcgttgtttcatcaagccttacggtcaccgtaaccagcaaatcaatatcactgtgtggcttcaggccgccatccactgcggagccgtacaaatgtacggccagcaacgtcggttcgagatggcgctcgatgacgccaactacctctgatagttgagtcgatacttcggcgatcaccgcttccctcatactcttcctttttcaatattattgaagcatttatcagggttattgtctcatgagcggatacatatttgaatgtatttagaaaaataaacaaatagctagctcactcggtcgctacgctccgggcgtgagactgcggcgggcgctgcggacacatacaaagttacccacagattccgtggataagcaggggactaacatgtgaggcaaaacagcagggccgcgccggtggcgtttttccataggctccgccctcctgccagagttcacataaacagacgcttttccggtgcatctgtgggagccgtgaggctcaaccatgaatctgacagtacgggcgaaacccgacaggacttaaagatccccaccgtttccggcgggtcgctccctcttgcgctctcctgttccgaccctgccgtttaccggatacctgttccgcctttctcccttacgggaagtgtggcgctttctcatagctcacacactggtatctcggctcggtgtaggtcgttcgctccaagctgggctgtaagcaagaactccccgttcagcccgactgctgcgccttatccggtaactgttcacttgagtccaacccggaaaagcacggtaaaacgccactggcagcagccattggtaactgggagttcgcagaggatttgtttagctaaacacgcggttgctcttgaagtgtgcgccaaagtccggctacactggaaggacagatttggttgctgtgctctgcgaaagccagttaccacggttaagcagttccccaactgacttaaccttcgatcaaaccacctccccaggtggttttttcgtttacagggcaaaagattacgcgcagaaaaaaaggatctcaagaagatcctttgatcttttctactgaaccgctctagatttcagtgcaatttatctcttcaaatgtagcacctgaagtcagccccatacgatataagttgtaattctcatgttagtcatgccccgcgcccaccggaaggagctgactgggttgaaggctctcaagggcatcggtcgagatcccggtgcctaatgagtgagctaacttacattaattgcgttgcgctcactgcccgctttccagtcgggaaacctgtcgtgccagctgcattaatgaatcggccaacgcgcggggagaggcggtttgcgtattgggcgccagggtggtttttcttttcaccagtgagacgggcaacagctgattgcccttcaccgcctggccctgagagagttgcagcaagcggtccacgctggtttgccccagcaggcgaaaatcctgtttgatggtggttaacggcgggatataacatgagctgtcttcggtatcgtcgtatcccactaccgagatgtccgcaccaacgcgcagcccggactcggtaatggcgcgcattgcgcccagcgccatctgatcgttggcaaccagcatcgcagtgggaacgatgccctcattcagcatttgcatggtttgttgaaaaccggacatggcactccagtcgccttcccgttccgctatcggctgaatttgattgcgagtgagatatttatgccagccagccagacgcagacgcgccgagacagaacttaatgggcccgctaacagcgcgatttgctggtgacccaatgcgaccagatgctccacgcccagtcgcgtaccgtcttcatgggagaaaataatactgttgatgggtgtctggtcagagacatcaagaaataacgccggaacattagtgcaggcagcttccacagcaatggcatcctggtcatccagcggatagttaatgatcagcccactgacgcgttgcgcgagaagattgtgcaccgccgctttacaggcttcgacgccgcttcgttctaccatcgacaccaccacgctggcacccagttgatcggcgcgagatttaatcgccgcgacaatttgcgacggcgcgtgcagggccagactggaggtggcaacgccaatcagcaacgactgtttgcccgccagttgttgtgccacgcggttgggaatgtaattcagctccgccatcgccgcttccactttttcccgcgttttcgcagaaacgtggctggcctggttcaccacgcgggaaacggtctgataagagacaccggcatactctgcgacatcgtataacgttactggtttcac

SEQ ID NO: 5997 - DNA, 5585 bp, synthetic construct
  source 1..5585: mol_type = other DNA
attcaccaccctgaattgactctcttccgggcgctatcatgccataccgcgaaaggttttgcgccattcgatggtgtccgggattgacagctagctcagtcctaggtataatgctagcgtggagatatacctcgagatgcggcgcggtcctgaaacgggaggcaaatgccgccaggaacatcaaggaccaggggctggcccaatatttcagtacgcgggagcggcgcgaaagcgcgtgaagctctttgtattgtctcagctataccggtcggaacgccggagaaggcccatgcttgcgggaaacgttgagcgaagcacaattgaaaaagttgcgtttcgttcagcgtttccataaccaggatgttgggaaacgagaagatgtgttcgcacatccaaagccctgcggggcgttccaaacattatgacgatgaaagatcgtcgatgccgtgaagcgcggcttgaagggcggacggaaggatgatcgtgccgccagacaaaaaaggaggaatcctcctcctcgaggcggccgcaataatagactagcataaccccttggggcctctaaacgggtcttgaggggttttttgctgaacgtacgttttacggctagctcagtcctaggtactatgctagcgtggagatatacggtaccaaggaggtaaataatgggagactacaaagaccatgacggtgattataaagatcatgacatcgattacaaggatgacgatgacaagggaggatccggcagcatggcagctaaaaggtcaaagagtgaaacattgcgctacaccaccctgaaggtgcgtttgtacccaagcgctgaacaggcggcgctgtttgaaaagacctttgggtgctgccgttacatctggaatcaaatgttggcggaccagcagcgtttttacatcgaaacggataaattcttcatcccgacaccggctaagtataaagcaggcgccccgtttttgaaggaggtcgacaaccaggcgttaattcaagagcacaataaactgggtcaggcgtttcgcgtttttttcaagtcaccggagaacttcggctacccgaaattcaaacgtaagaaggacgaccgtgacagctttaccgtttgtaatcatgttatgggtaattccgaaacggtgtataccactcgtgatggcctgcgtatgaccaaagcgggtattgtgcgggcaaagttcccgcgtcgtccgcaaggttggtggaaactgaagcgcgtgaccgtggatcgtacccgtagtggtaaatactatggttatatcctgtatgaatgcccggaaaagaagccggaggtggttgtaccgaccccggagactacggtgggtctgaagtacagcatggcgcgtttttatgttgctgataccggcgaaaccgcagacccgccgcattggctgaagcagagccaggagaagctcgctcgcattcaacaacgcctgaaccgcatgcgtccgggttcgaaaaactatcaggaaaccgtccagaaataccgtttgctccacgaacacattgcgaaccaacgtcgtgacttcatacataaggaaagccgtagaatcgccaacgcctgggatgccgtgtgcgttagaggtgatgatatggaacaaatctcccgcattaccaaccgtggcaacgcactggaagcaggttttggcatgttccgcgagtgcctgcgttacaaactggcccgccagggcaaagagctgctggttgtcgaccgttacttcccatccacccgcacgtgcagcgcgtgtggcagagtgatgccggaagagatcagcatgaaaaggcgcacctggacctgcccacaatgtggcgcagttctgaaacgtgaggcgaacgcggcgcgcaatattaaagaccaaggactggcgcagtatttctctacgcgtgagcgcagagagtctgcgtaaggccttaagagaaggagatatacatatgttatgtttgaatctaacacccggagaatacatgacgatcggcgactcggtcgtggtgcaattggaccgtattagcggtgaccgctgcaagctgatgattgatgcgccacgtgagatcccggtattgagaggcgaggttctggaacgcaccggcggtgagcgcccttcttgtgttgtggaaggtccgcgttggcatcgtcgcgagatcccgtggaatcgtagcaaggcgcaggcgctcgcggcaatgcgtatgctgctgagcgaaatggatggccgtgattccaacgttcaagccctgcgccgtcagctggaccacatgttcccgccggaaccgggtcgtgagaaaaccgaattaccggcacgtgctagcaacaacggaggaagcggatcgtacccatacgatgttccagattacgcttaataagaattcctgctgccaccgctgagcaataactagcataaccccttggggcctctaaacgggtcttgaggggttttttgctgaaacctcaggcatttgagaagcacacggtcacactgcttccggtagtcaataaaccggtaaaccagcaatagacataagcggctatttaacgaccctgccctgaaccgacgaccgggtcatcgtggccggatcttgcggcccctcggcttgaacgaattgttagacattatttgccgactaccttggtgatctcgcctttcacgtagtggacaaattcttccaactgatctgcgcgcgaggccaagcgatcttcttcttgtccaagataagcctgtctagcttcaagtatgacgggctgatactgggccggcaggcgctccattgcccagtcggcagcgacatccttcggcgcgattttgccggttactgcgctgtaccaaatgcgggacaacgtaagcactacatttcgctcatcgccagcccagtcgggcggcgagttccatagcgttaaggtttcatttagcgcctcaaatagatcctgttcaggaaccggatcaaagagttcctccgccgctggacctaccaaggcaacgctatgttctcttgcttttgtcagcaagatagccagatcaatgtcgatcgtggctggctcgaagatacctgcaagaatgtcattgcgctgccattctccaaattgcagttcgcgcttagctggataacgccacggaatgatgtcgtcgtgcacaacaatggtgacttctacagcgcggagaatctcgctctctccaggggaagccgaagtttccaaaaggtcgttgatcaaagctcgccgcgttgtttcatcaagccttacggtcaccgtaaccagcaaatcaatatcactgtgtggcttcaggccgccatccactgcggagccgtacaaatgtacggccagcaacgtcggttcgagatggcgctcgatgacgccaactacctctgatagttgagtcgatacttcggcgatcaccgcttccctcatactcttcctttttcaatattattgaagcatttatcagggttattgtctcatgagcggatacatatttgaatgtatttagaaaaataaacaaatagctagctcactcggtcgctacgctccgggcgtgagactgcggcgggcgctgcggacacatacaaagttacccacagattccgtggataagcaggggactaacatgtgaggcaaaacagcagggccgcgccggtggcgtttttccataggctccgccctcctgccagagttcacataaacagacgcttttccggtgcatctgtgggagccgtgaggctcaaccatgaatctgacagtacgggcgaaacccgacaggacttaaagatccccaccgtttccggcgggtcgctccctcttgcgctctcctgttccgaccctgccgtttaccggatacctgttccgcctttctcccttacgggaagtgtggcgctttctcatagctcacacactggtatctcggctcggtgtaggtcgttcgctccaagctgggctgtaagcaagaactccccgttcagcccgactgctgcgccttatccggtaactgttcacttgagtccaacccggaaaagcacggtaaaacgccactggcagcagccattggtaactgggagttcgcagaggatttgtttagctaaacacgcggttgctcttgaagtgtgcgccaaagtccggctacactggaaggacagatttggttgctgtgctctgcgaaagccagttaccacggttaagcagttccccaactgacttaaccttcgatcaaaccacctccccaggtggttttttcgtttacagggcaaaagattacgcgcagaaaaaaaggatctcaagaagatcctttgatcttttctactgaaccgctctagatttcagtgcaatttatctcttcaaatgtagcacctgaagtcagccccatacgatataagttgtaattctcatgttagtcatgccccgcgcccaccggaaggagctgactgggttgaaggctctcaagggcatcggtcgagatcccggtgcctaatgagtgagctaacttacattaattgcgttgcgctcactgcccgctttccagtcgggaaacctgtcgtgccagctgcattaatgaatcggccaacgcgcggggagaggcggtttgcgtattgggcgccagggtggtttttcttttcaccagtgagacgggcaacagctgattgcccttcaccgcctggccctgagagagttgcagcaagcggtccacgctggtttgccccagcaggcgaaaatcctgtttgatggtggttaacggcgggatataacatgagctgtcttcggtatcgtcgtatcccactaccgagatgtccgcaccaacgcgcagcccggactcggtaatggcgcgcattgcgcccagcgccatctgatcgttggcaaccagcatcgcagtgggaacgatgccctcattcagcatttgcatggtttgttgaaaaccggacatggcactccagtcgccttcccgttccgctatcggctgaatttgattgcgagtgagatatttatgccagccagccagacgcagacgcgccgagacagaacttaatgggcccgctaacagcgcgatttgctggtgacccaatgcgaccagatgctccacgcccagtcgcgtaccgtcttcatgggagaaaataatactgttgatgggtgtctggtcagagacatcaagaaataacgccggaacattagtgcaggcagcttccacagcaatggcatcctggtcatccagcggatagttaatgatcagcccactgacgcgttgcgcgagaagattgtgcaccgccgctttacaggcttcgacgccgcttcgttctaccatcgacaccaccacgctggcacccagttgatcggcgcgagatttaatcgccgcgacaatttgcgacggcgcgtgcagggccagactggaggtggcaacgccaatcagcaacgactgtttgcccgccagttgttgtgccacgcggttgggaatgtaattcagctccgccatcgccgcttccactttttcccgcgttttcgcagaaacgtggctggcctggttcaccacgcgggaaacggtctgataagagacaccggcatactctgcgacatcgtataacgttactggtttcac

SEQ ID NO: 5998 - protein, 139 aa, Flavonifractor plautii
MLQLSLRPGEYLTIHGDIVVQLAQLSGSRAFLRVEADRSIPIVRGKVLERSGAPRPECLASLPRSRARKGRDAVYHWSAERERAVRTMEQLLERMEAGDSREEAQALRAQLEHLLPTVWEEELSGQIQALFRSKTAQDV

SEQ ID NO: 5999 - protein, 126 aa, Oscillibacter sp.
MLCLNLTPGEYMTIGDSVVVQLDRISGDRCKLMIDAPREIPVLRGEVLERTGGERPSCVVEGPRWHRREIPWNRSKAQALAAMRMLLSEMDGRDSNVQALRRQLDHMFPPEPGREKTELPARASNN

SEQ ID NO: 6000 - protein, 127 aa, unidentified
MLCLSLNQGEYMTIGENVVVQLDHVTGDRCRLVIHAPKEVPILRGEVLERNGGQRPECVYDGHRYHKKELIWNRSKAQALAAMRRLLEEMDGANSDVQALRRQLNHMFPPADGGAGDSPQTTQFSNG

SEQ ID NO: 6001 - protein, 139 aa, Flavonifractor plautii
MLQLSLRPGEYLTIHGDIVVQLAQLSGSRAFLRVEADRSIPIVRGKVLERSGAPRPECLASLPRSRARKGRDAVYHWNGARKRAIRAMEQILDQMESDGPREEVQALRVQLEQLLPTQQEEELSGQIQALFRDQAARNT

SEQ ID NO: 6002 - protein, 137 aa, Pseudoflavonifractor sp.
MLSLSLLPDEYLSINNGQIIVHLIRVAGGRAHLRIEADRSVPIVRGALLEREGAARPECLTPPPRRNPGHRRDHLYLWNDDRERAVRAIQQSIDRLEQTGETAEADILRTQLNRLIPTFWEEEKLPRRLREQTADSV

SEQ ID NO: 6003 - protein, 141 aa, Flavonifractor plautii
MLSLQLKSGEYVTIGEEIAVQVFKQSGDSFHVAVKAPREVPILRGKVLERTERRPDGLYRRPPQSPSEQRHNAKRLEAWTLKKAMREQIRAAAMEDLLEVAQYIEDLAVDRSCCVERQRLSVLGVRITKAVSVLNSTGGGM

SEQ ID NO: 6004 - protein, 148 aa, Intestinibacillus sp.
MLSLQIKSGEYITIGENVVIQVFQRSGSQFRLAIQAPRELSIVRGEVRERQGNARPESVCDPSNGPMVRQQARRMQRLEARQKAAAIRADAVQQLRTLLHQSDAGAAIELAVALQLERLEQSEILATEGGATRDGTNKNLEHDHQSAP

SEQ ID NO: 6005 - RNA, 182 nt, synthetic construct
  source 1..182: mol_type = other RNA
atatgccggccgggacaccggtgaacgcccatgattccggctggagagcgtggatggaacgccggtggggagcctccgcccttccatccacattctccggaccgccgagtgggaaacgagaggccgcatccgtgcggctgaagcctgtaagcaggcgtccacaatattatgacgatgttttt

SEQ ID NO: 6006 - RNA, 176 nt, synthetic construct
  source 1..176: mol_type = other RNA
ctataccggtcggaacgccggagaaggcccatgcttgcgggaaacgttgagcgaagcacaattgaaaaagttgcgtttcgttcagcgtttccataaccaggatgttgggaaacgagaagatgtgttcgcacatccaaagccctgcggggcgttccaaacattatgacgatgaaaga

SEQ ID NO: 6007 - RNA, 179 nt, synthetic construct
  source 1..179: mol_type = other RNA
cgatgccggtcgggacgccggggaatgcccgcgattcggctggagggcgttgagcgaagctcaaaagaatttgtgtttcgctcagcgttttccaggccggagggtgggaaacgagagggcgcgtgcgcgcgcctgaaagcctgtgacagggctgtccaaaatattatgacgatgaaaaa

SEQ ID NO: 6008 - RNA, 198 nt, synthetic construct
  source 1..198: mol_type = other RNA
atctgccggctggaacaccggtgaaggcccatgctcccggtctgggagcgttgagcgaagcggcatacaggaagatgccgtttccctcagcgttctccgggcgggggacgttgggaaacgagagggcgcctctcccaaccgggagccgcgccggaagcccggtcagacgggcgttcccaatattatgacgatgtttac

SEQ ID NO: 6009 - RNA, 195 nt, synthetic construct
  source 1..195: mol_type = other RNA
tgttgccggccggaacaccggagaaggcccatgcttcccgttggggagcgttgagcgaagcggcggacagtacgctgccgtttccctcagcgttctccaatccgcgggagatcgttgggaaacgagaagatgcctcccctctggggccgcatccgaagcccggcagggcgttccaaacattatgacgatgatcat

SEQ ID NO: 6010 - RNA, 142 nt, synthetic construct
  source 1..142: mol_type = other RNA
tatggccggtcgggacgccggtgaacgcccgcataccctccaataggcggggccgcgggaaacgagaggccgcctcccccttaccggggccgcggcggaagcccggacagccgggcgtccaaaatattatgacgatgataac

SEQ ID NO: 6011 - RNA, 205 nt, synthetic construct
  source 1..205: mol_type = other RNA
taggaccggttgggacaccggtgtctgcccatgacacaaggatgcggaagcgttgattgggtcgaaagaacgggtttctttcgacgcgatcagcgtttccgttcggatgtgaagtgggaacaaaagacggcaacctccgccatccccaggagcgcgcccgaagcccggcatgccgggcagtccccgagaatccaacattatattt

SEQ ID NO: 6012 - RNA, 20 nt, synthetic construct
  source 1..20: mol_type = other RNA
aatattatgacgatgttttt

SEQ ID NO: 6013 - RNA, 20 nt, synthetic construct
  source 1..20: mol_type = other RNA
aacattatgacgatgaaaga

SEQ ID NO: 6014 - RNA, 20 nt, synthetic construct
  source 1..20: mol_type = other RNA
aatattatgacgatgaaaaa

SEQ ID NO: 6015 - RNA, 20 nt, synthetic construct
  source 1..20: mol_type = other RNA
aatattatgacgatgtttac

SEQ ID NO: 6016 - RNA, 20 nt, synthetic construct
  source 1..20: mol_type = other RNA
aacattatgacgatgatcat

SEQ ID NO: 6017 - RNA, 20 nt, synthetic construct
  source 1..20: mol_type = other RNA
aatattatgacgatgataac

SEQ ID NO: 6018 - RNA, 20 nt, synthetic construct
  source 1..20: mol_type = other RNA
gagaatccaacattatattt

SEQ ID NO: 6019 - RNA, 367 nt, synthetic construct
  source 1..367: mol_type = other RNA
gtgcggcgcggttcatgaccgtgaggtcaacgcggcaaaaaacatcaaagcccgtgggctggaacagttttttgatttacaggggcaggacaggagcgcctgaccctttccaggcgtcctgtgctccgccttgacaatatgccggccgggacaccggtgaacgcccatgattccggctggagagcgtggatggaacgccggtggggagcctccgcccttccatccacattctccggaccgccgagtgggaaacgagaggccgcatccgtgcggctgaagcctgtaagcaggcgtccacaatattatgacgatgtttttgcacgcggcgcatggatgcgcgccgctggccacaggaaggagatccccc

SEQ ID NO: 6020 - RNA, 377 nt, synthetic construct
  source 1..377: mol_type = other RNA
atgcggcgcggtcctgaaacgggaggcaaatgccgccaggaacatcaaggaccaggggctggcccaatatttcagtacgcgggagcggcgcgaaagcgcgtgaagctctttgtattgtctcagctataccggtcggaacgccggagaaggcccatgcttgcgggaaacgttgagcgaagcacaattgaaaaagttgcgtttcgttcagcgtttccataaccaggatgttgggaaacgagaagatgtgttcgcacatccaaagccctgcggggcgttccaaacattatgacgatgaaagatcgtcgatgccgtgaagcgcggcttgaagggcggacggaaggatgatcgtgccgccagacaaaaaaggaggaatcctc

SEQ ID NO: 6021 - RNA, 418 nt, synthetic construct
  source 1..418: mol_type = other RNA
ctgcccaaagtgcgggacggtccacgaccgggaggtcaacgcagcaaaaaacatcaagctggaaggtttggcgcagtttttaccaaccgcgagcccagcgtaagcgggtcgcggttggagaggaggagcaagggagtgaagtgaggaatgcccggcagggtgttccgaacgaaatggactttgctccgacgatgccggtcgggacgccggggaatgcccgcgattcggctggagggcgttgagcgaagctcaaaagaatttgtgtttcgctcagcgttttccaggccggagggtgggaaacgagagggcgcgtgcgcgcgcctgaaagcctgtgacagggctgtccaaaatattatgacgatgaaaaatggcggaaggatggagtgccggaccgccttgtgaaaaaggagttgaaaaa

SEQ ID NO: 6022 - RNA, 326 nt, synthetic construct
  source 1..326: mol_type = other RNA
agcggagcaccggcgggggatgaacgctgccatcaacatcaaggccagcggactggtaaaaggccagagccagcaggctgcggcggcccttccactcctctgatacaacaacatctgccggctggaacaccggtgaaggcccatgctcccggtctgggagcgttgagcgaagcggcatacaggaagatgccgtttccctcagcgttctccgggcgggggacgttgggaaacgagagggcgcctctcccaaccgggagccgcgccggaagcccggtcagacgggcgttcccaatattatgacgatgtttacacacaaggagatcccc

SEQ ID NO: 6023 - RNA, 379 nt, synthetic construct
  source 1..379: mol_type = other RNA
gtgcggcgcggagcacaaacgagggaaaaacgccgccgtcaatatcaaagcccatgggctggcgtgttaccagaataaacaggttgcggaggcagtttcataaccttcctgcaaaaagtgatgttgccggccggaacaccggagaaggcccatgcttcccgttggggagcgttgagcgaagcggcggacagtacgctgccgtttccctcagcgttctccaatccgcgggagatcgttgggaaacgagaagatgcctcccctctggggccgcatccgaagcccggcagggcgttccaaacattatgacgatgatcatccaagatgatcgtaccagcgcaaaggagtgcgctgtctcatcagacacaggaggtctttttgt

SEQ ID NO: 6024 - RNA, 461 nt, synthetic construct
  source 1..461: mol_type = other RNA
ctgcgggacggagcacaggcgcgaacgcaacgcagcggcgaatgtcaaagccatcggcctgggccggtaccgcacggagacggcagccggcggaattgggtagcacgaagtgccccgcaggtagcgggggtactccatatggccggtcgggacgccggtgaacgcccgcataccctccaataggcggggccgcgggaaacgagaggccgcctcccccttaccggggccgcggcggaagcccggacagccgggcgtccaaaatattatgacgatgataacccttaatctggtttcatccggcctagcgcagccggttgaaatataggaagcgtgcggagagagcaggtgccaaaggccacggagcctgccgaaccgcactaaacaaccaaccgcacaagaaggatactgtgcggcgaccagcaaagtcccttatcatttcatattgaaaggaagcaatttga

SEQ ID NO: 6025 - RNA, 476 nt, synthetic construct
  source 1..476: mol_type = other RNA
ctgtggtacaacgcttgaccgtgccaaaaatgcggcgcaaaacctgcgcgatcagggccttgtacaatattccgcttcccagaggcagcgcgcttcggcctgactctgtcataggaccggttgggacaccggtgtctgcccatgacacaaggatgcggaagcgttgattgggtcgaaagaacgggtttctttcgacgcgatcagcgtttccgttcggatgtgaagtgggaacaaaagacggcaacctccgccatccccaggagcgcgcccgaagcccggcatgccgggcagtccccgagaatccaacattatatttgttttcatccggccgacgggtcggttgaaatagagttcatgcgtcccatgattttgggcagttcggccgaatgtccgaagttccatgacgcttccacgacctgtgctggggtaaattggatggccccgtcacactaatcagatttaggaggaacctaatt

SEQ ID NO: 6026 - protein, 366 aa, Empedobacter brevis
MMEKSTLILTRKIQLIVDLPTQEERQEVLEILYKWRNRCYRAANLIVSHLYIQAMVKEFLYLSEGVIHKLVDEKKDEAGILQRSRINTTYRVISDRFKGEIPMNILSCLNSRLQSTFNKDYQEYWRGEASLKNFKRDMAFPFGLEGISKLSYHPEKKSFCFRLFQLPFKTYLGRDFTGNKKLLEQVINDEVKLCTSQIKIEKGKIFWLAVVEIEKENHQLQPEKIAEASLSLEYPLVVKVGKSRLSIGTKEEFLYRRLAIQASRKRMQAGVSYAKSGKGRTRKLKALEKMSELERNYVHNRLHVYSRRLIDFCINNKAGTLILLDQEEKMELAKEEEFVLRNWSYYELMTKIKYKADKAGIELIIA

SEQ ID NO: 6027 - protein, 365 aa, Paenimyroides ummariense
MSKTTIKLTRKIELNIDLPTKEQRKEVWEKLYRWQNIYCRAANLTMSHLYVQAMIKDFLYLTEGIKYKLADEKKDPNGMLQCSHSSSIYRMLSQRFKGEVPTKILNHANYELMNKFKKNYMDYVNGKRSLDNFKSNTVFPFGIEGFKRFKYNEEIKAFSFRLYSVPFKTFLGRGFTEKYKLLQQLLSGEVKLCRSRIKLEKGKIYWLAVFEIPIEVHCLKPDVVAEASLSLEYPISVKVGRKRLDIGNKEEFLHRRLAIQAAYTRTRESVKYCRGGHGKKRKLKALDRFKNLEANYVSNRLHEYSRRLIDFCIKHQAGTLVLLDMQENTDIAKEEQFVLRNWSYYELINKIKYKAEKAGIELITT

SEQ ID NO: 6028 - protein, 365 aa, Flagellimonas sp.
MGKSTLKHTRKIQILIDLPTKDEKKEVMDMMYQWRDRCFRAANIIVTHLYVQEMIKDFFYLSEGIKYKLADEKKDEKGILQRSRMNTTYRVVSDRFKGEMPTNILSTLNHGLISSFNKNRVQYWKGERSLPNFKKDMAFPFGLQGISRLVYDEEKKAFCFRLYRVPFKTYLGKDFTDKRMLLERLVKGDVKLCASNIQLNGGKIFWLAVFEIEKEKHSLKPEVIAEASLSLEYPIVVKTGKNRLTIGTKEEFLYRRLAIQAARRRTQVGATYSRSGKGKKRKLKAVDKYHKTESNYVAHRIHVYSRKLIDFCIKHQAGTLILMNQEDKVGIAKEEEFVLRNWSYYELMTKIKYKAEKAGIELIIG

SEQ ID NO: 6029 - protein, 365 aa, Flagellimonas sp.
MGKSTLKHTRKIQLLIDLPTKDEKKEVMDIMYQWRDRCFRAANLIVTHLYVQEMIKEFSYLSEGIKYKLADEKKDEKGILNRSRINTTYRLVSDRFKGEVPTNILSTLNHGLISSFNKNRIQYWKGERSLPNFKKDMAFPFGLQGISRIVYDEEKKAFCFRLYRVPFKTYLGKDFTDKRMLLERLVKGDVKLCASNIKLNGGKIFWLAVFEIEKEKHSLKPEVIAEASLSLEYPIVVKTGKNRLTIGTKEEFLYRRLAIQAARRRTQVGATYSRSGKGKKRKLKAVDKYHKTESNYVAHRIHVYSRKLIDFCIKHQAGTLILMNQEDKVGIAKEEEFVLRNWSYYELMTKIKYKAKKAGIELITG

SEQ ID NO: 6030 - protein, 365 aa, Flagellimonas sp.
MEKSTLKLTRKIQILIDLLTKEEKKEALDKLYQWQNRCFRAANLIVTHLYVQEMIKEFFYLSEGIKYKLADEKKDEQGILNRSRINTTYRVVSDRFKGEIPTNILSNLNQALISSFKKNRSEYWNGERSLKNFRRDMAFPFDLEGMSGLAYNEEKKAFCFRLFRIPFKTYLGKDFTDKRTLLERVVQGKTKLCTSHIKLKDGKIFLLAVFEIEKERNDLRPEIIAEASLSLEYPIVVKVGKARLTIGTKEEFLYRRLAIQSAHRRAKIGATYSKSGKGIKRKLKAVDRLGQAERKYVHNRLHVYSRRLIDFCVKHRAGTLILLNQEEKTGIAKEEGFVLRNWSYNDLMTKIKYKANKAGLEVIID

SEQ ID NO: 6031 - protein, 365 aa, Allomuricauda ruestringensis
MEKTTLKLTRKIQLLIDLSTKEEKKEALDKLYQWQNRCFRAANLIVTHLYVQEMIREFFYLSEGKKYKLADEKKDEQGILNRSRINTTYRVVSDRFKGEIPTNILSNLNQALISSFKKNRPEYWNGERSLKNFRRDMAFPFDLEGMSGLHYNEEKKAFCFRLFRIPFKTYLGKDFTDKRTLLERVVEGKTKLCTSHIKLKEGKIFLLAVFEIEKENHDLRPEIIAEASLSLEYPIVVKVGKARLTIGTKEEFLYRRLAIQSAHRRAKIGATYSKSGKGIKRKLKAVDRLGQTERKYVHHRLHVYSRRLIDFCVKHRAGTLILLNQEEKTEIAKEEGFVLRNWSYCDLMTKIEYKAKKAGLELIID

SEQ ID NO: 6032 - protein, 365 aa, Salegentibacter mishustinae
MGKDTITLTRSIRLEIDLPTQEERQEAKSKLYQWRYRCHKAANLIVSHLYVQEMIQEFFYLSEGVKYKLVDEKKDELGIFNRSRMNTTYRLVSDRYKGKMPTNILSQLNSIIQSSFKKNREEYWKGERSLQNFKKEMAFPFTMEGVCGLEFNPEKSAFCFRFFSIPVKTYIGRAFNDKWKLMHQLTKGEIKMRTSYLKLKDGKIFMMAAFEMEKEKHQLRPEVFAEARLSLEYPIIVKIGKAKLSIGSREEFLYRRLAIQAARRRTREGVKYARSGNGHKRKTKAAARFKDKERNYVNQRLHVYSRELIDFCVKHQAGTLILVDQEQKIELAKEEAFVLRNWGYYDLMTKIKYKAEKAGIELIIG

SEQ ID NO: 6033 - protein, 366 aa, Leeuwenhoekiella palythoae
MMKNKTLSLTRKIQLKVDLPTYEERKEAIGKLYQWQNRCFKAANIIVTHLYCQEMIKEFFYLTEDIQYKLADQKKDENGILNRSRINTTYRVIADRFKGEIPMEILSNLNRNLESSFNKNKPKYWKGERSLKNFRRDIGFPFPARCMWGFKHDPERNAFCFRLFQIPFCTYLGRDFSDKRSLLHRAVKGEVRLRTSEIKLTDTKIFWLAVFDIEQEQHALKPEVIAEASLSLEHPISVKVGGNRLNIGNKEEFLYRRLAIQAARKRALAGTVNSRGGHGRTRKLKAVEKYKDKETKYVNQRLHVYSRRLIDFCVKHQAGTLILLHQEDKIEAAKENQFVLRNWNYYELTKKIEYKAKKAGIELVID

SEQ ID NO: 6034 - protein, 364 aa, Sphingobacterium daejeonense
MEKESIILTRKVQIYLDCDDKGQRSAYFKQLFEWQDMVYRGANMVMTHQFVQEQIKDLIYLRDDVKVKLADFKKDPEGIFNSSKMNTTYRILSLYFKGKLPSKIISAMNMTLNRAYSTDRSSYWKGEKSLRNYRKDMPIPFGGDQLKLGNDEKGRDFRFTLFKIPFRTYLGKDRSDKRILLQRCLVGQIKICTSSIKMVKGKIFLLLALELPKKQHDLKEHIIAEASLSVEHPITVSIDRDNFQIGNKEEFLYRRLAIQAARHRIQKAVAFNRGGHGRRKKLKSLEHFTEREKRYVDSKLHLYSRRLIDVCVNSGAGTLLLVNQSNKEEAAKEDRFLLRNWGYYGLIEKIRYKANMAGINVIVE

SEQ ID NO: 6035 - protein, 362 aa, Leadbetterella byssophila
MEKIILTRKIQLVIPCKDREILKSYYDRLYEFQRHTCKAANLIHTHLFIQDRWKEMVYLAEDAKISLADHKKKEGGVLNTSRMNSTYRQLSAHFLKVLPSNTMSNLNQAVYRTYQANRDLYWRGEKSLPNYRRDIPIPFSSREMRWEEAGDGKNFLLYLFRIPFKTYLGRDRSELKSLLKKIVKGEIALRQSALQIKNNKIYLLASVEVEKAKHSLDKTLIAEVALSLEYPLVIKIGKDEFQIGSKEEFLYRRLSIQAARRRLQQACAYRSGGKGKEERYKCLKHYKEKEKNYIEEKLHLYSRRLIDYCVKAGAGTILLVNQSYKEELAKEDPMLLRNWSYYGLKEKIAYKAKMAGIHVLVE

SEQ ID NO: 6036 - protein, 363 aa, Mucilaginibacter rigui
MADNMYITRKIQIIVNSPDKDVVYDAIGKLMQWQQACYKCANLIYTHQFLQEQIAEMVYLADGVKLKISDHHKDADGMLVSSRTNSTYKVLTEKFKGVLPSSIYNNLNSQLVSTFLKERGLYVNGERSIRNFKRSIAMPFSAENIRRLTAGDHGNFTFILFGIPFRTYLGRGYDEKRELLRQVVNGKIKLASSFLKVEQKKVFLLATFEQEKQFHLLGGAIIAEASLSLEYPLTVKVGKARMTIGSKEEFLHRRMAIQAARSRVQASVDGNKAGHGKVRKRKPLAHYQSLEKDYIKHKLNVYSKRLIDFCLQHRAATLILTGQQEKEEIAMAEPFLLRNWNFAGLKEMIAFKAAKVGIDLIVE

SEQ ID NO: 6037 - protein, 365 aa, Puia dinghuensis
MNAETMILTRKVQLIIDSNDKAFIGEVYRTLYRWQYICFRAANYIFTHLFIQEQLKELFYLKDEVKVKLADCCKNPDGILTCSQLGTTYRVLNKHFKGDIPMNIISSLNMTLAKHFNNEKEGYLKGEKSVRNYKRDIPIPFQRRNITRLQLAENAKEYKFNLFKIPFHTYLGRDKFDKRLLFDRLLKGEVQLKNSSLQLCNGKIYLLAAFETRKEKHELDASIVAEAHLSIDYPIVVRIGKFQATIGSKEEFLYRRLAIQAARSRAQKDASYNRGQHGRRRKLKALEHFRDRERDYVQQRLHVYSRQLIDLCVKHRAASLILVGQTEKEAAAAGEEFVFRNWSYYALKEKIQYKANKAGIMLITE

SEQ ID NO: 6038 - protein, 365 aa, Pedobacter suwonensis
MESNKMVITRKIQLLIDSEDKEEVKKMKDQLYNWQWITYRSANMIMSHHFVQEQVKDFFYLTEDIKLKIADEKKEENGILKSSCQNTTYRLLSNHFKGQIPTNILSNLNNTLISYFNKEKSAYWKGEKSLRNYKKNIPMPFEASVISKFVYTPDRRNFSFKLFKIPFRTYLGKDRSDKKIMLEKIMNGTLKLCVSNIQLDKGKIFLLAAIQVDKEQHTLDTSIIAEASLSIEHPITVKIGKYEHTIGTKEEFLHRRLAIQAAIYRVQKAVKFNRGGHGSKRKRRSLVDYQHQEKRYVEYKLHLYSRMLINLCLKYQAATLLLLNQEEKEEIAKDDVFLLQNWSYYSLKEKIAYKAARAGIQMIVE

SEQ ID NO: 6039 - protein, 364 aa, Chryseobacterium gleum
MEKSTMTLTRKIQLMIDLPSDKKNEMWEKLYRYQNLCFRAANLIASHLYVQEMIKDFFYLTEEIQYKLADEKKDEMGMFNRSKTGTTARMVFDRFKGEIPTDILGSLNNTIQSTFSKNKADYWQGTKSVRNYKRDIPIPLPVKCISKMKYDPDKKAFCFNMFAIPVKTYLGKDYTDKRVTMERLLKGDIKLCTSQIQLKDRKIFWLAVFEFKKEENHLKPEIIAEASLSLEHPIVAKANNLRINIGSKEEFLYRRLAIQASQKRIQDGIAYARSGNGSKRKQKALYKTENLESRYVTHRLHMYSRKLIDFCVQQQAGTLILKNQEDKIGIAKEQEFVLRNWNYYELQTKIKYKAEKAGIELIIG

SEQ ID NO: 6040 - protein, 365 aa, Zunongwangia profunda
MGKETIKLTRKIQLLVDAPNKEERKEALDTLYRWQNRSYRAGNLIVTHQYIQEMIKDFFYLSEGIRYRLVDEKKAEDGILNRSKSNCTYRVVSDRFKGEVPTNILANMNYNIMNNFSKNLVQYRRGERSLANFRRDIPFPFGTIGIHGLSYKKEKKAFCFRLFSIPFKTYLGKDYTDKRSLLEQVVAGNIKLCTSKIQLNKGKIYWLAVFEVAKEKHNLKPEVIAEASLSLEHPIIVKSRKATLSIGSREEFLYRRLAIQAALKRAQNATAYCRSGKGRKRKTKAVERFHEKEKNYVSNRLHVYSRKLIDFCIKHEAGTLILLNQEDKMEIAKEDGFVLRNWNYYELMTKIKYKAEKAGIELIVD

SEQ ID NO: 6041 - protein, 364 aa, Chryseobacterium balustinum
MEKSTMTLTRRIQLLIDLPANEQKEMWEKLYRYQNRCFRAANFIVSHLYVQEMIKDFFYLTEDIQYKLADENKDKMGIFTRSKTHTTARMVFDRFKGEIPTDILGSLNNTIQSTFSKTKADYWQGTKSLRNFKKDIPIPLPVKCISKMKYDPEKKAYSFNMFAIPVKTYLGNDYSDKRVIMERLLREEIKLCTSQIQLKAGKIYWLAVFEFEKEEHKLKPEIIAEASLSLEHPIVVKANNVRINIGSKEEFLYRRLAIQASQKRIQDGIAYTRSGNGVKRKQKALYKTENLESRYVSHRLHLYSRKLIDFCIQQQAGTLILKNQEDKIGIAREQEFVLRNWSYYELQTKIKYKAEKAGIELIIG

SEQ ID NO: 6042 - protein, 364 aa, Paenimyroides baculatum
MEKTTMKLTHKFRIVVDLPTYAERKEAMDKLYRWRNRCYRAANLIVSHLYVQEMLKEFFYLTEGVQYKLADEKKHEAGMLTRSRINTTYRALSDRFKGEMPMNILSCLNNSIISSFRKESEAYCKGERSIKNFKKTMAFPFGLEGIGGFCYNEEKRTFYFRLFSIPFRIYLGKGRTEKTKVLQQVISGEIKMCSSHIKINDGKVFWLPVFEIKKEEPTLKPEIIAEASMSFEYPLIVKIGRARYTIGTQEEFLYRRLAIQASLERLRVGAQYCRSDKGTRRKLKATEKLKKAESNYVNNRLHVYSKRLIDLCVEHKAGTLILADQQEKMEVAKTEEFVLRNWSYYNLMTKIKYKANKAGIELIM

SEQ ID NO: 6043 - protein, 260 aa, Empedobacter brevis
MLEKEFELLKKGNSTALERIYVRYNKRIFWFGKQLIKDEFVVECLLQDVFLKLWEYREKIESPDHIFFFLRFVMKYSCYSHYAKPKNKFFRNVNSIENYENYQSYLAGYDPADVIENLNEQERQQHYFNEIIKVLPLLSTERKHLIELCLKYGFQYKAIAHVMGRGITETSNEIKSAIEDLKKILSHQDKLIIKTKTISTEEKQEKMTKTQSLILKLRCEHKQSFANIAEELQLSQKEVHNEFIAAYKFTQQNKVQSLNY

SEQ ID NO: 6044 - protein, 211 aa, Paenimyroides ummariense
MVQDTFLKLWDCREKIQDPMHILFFLQYVIKKSCLSHYNKPRNKFFRKVGSLESYENFQNYLAGYDPADVVENLKDQESQQKMFDLVTSVLPLIKPERKHLINLCLKYGFRYKHIAQVMGKSTKQTVDEVNRAIEDIKKIVAVRNRNEKKFKPELEQKAVSERQSQVLKLRCEKKFSFAAIAEQLNLSQKQVHEEFMAAYKFAQQHKLQSL

SEQ ID NO: 6045 - protein, 261 aa, Flagellimonas sp. [sequence omitted]

SEQ ID NO: 6046 - protein, 261 aa, Flagellimonas sp.
MSYSDFELLKIGDSSALDHIHAKYFRSIFWIGKQWLNDEFLIESLVQDTFLKLWVNRDKLESPEHIFYFLRFVMKRECISYYRKPKYKFYKKVNSLEDYENYQDYMAGYDPVNDSKNLDDQESTQKSFDHIKSIFPLLNADKRHLIELCLKYGFQYKAISKVMGKGIIETSREIKEAIEHIKTIVHQGNKLDSSDTMTNQIKFSKELSEEQAKVLKMRCELNYTFSEIAKELELSQKEVHQEFMKAYRLMKANHQLQLQSA

SEQ ID NO: 6047 - protein, 264 aa, Flagellimonas sp.
MENQNSLEECYERLKKGCAISFTEIYTKYHRQIFWLGKSFLDDGFVVETLVQDVFLKLWVNRDSLESPKHIYFFLRFVMKRECITYYTRPRNKFFRKVHSLESFENYQDYMVGYDPAVDNNNVKLQEGEQEKFESIKRVLPLLDDSKRHIINLCLKYGFQYKAISKVMGKGINETCREIKEVIEDIKTILHRGNKLDSSNNNMDEIKFTGEMTEEQTKVLKMRCELRYSFSEIANELNLSQKEVHQEFMIAYRLMEAKHQLQSA

SEQ ID NO: 6048 - protein, 264 aa, Allomuricauda ruestringensis
MENHHTLEECYKGLKKGCSNSFTEIHTKYNRQIFWLGKSFLDDGFVVETLVQDVFLKLWVHRDTLESPKHIYFFLRFVMKRECISYYTRPKNRFFRKVHSLESFENYQDYMVGYDPAEDNNNVKLQEGEQEKFESIKSVLPLLDDSKRHVINLCLKYGFQYKAISKAMGKGINETCREIKEAIEDIKTILHQGNKLDFGDNNTDEIKFTGEMTEEQTKVLKMRCELRYSFSEIADELNISQKEVHQEFMIAYRLMEAKHQLQSA

SEQ ID NO: 6049 - protein, 260 aa, Salegentibacter mishustinae
MLQRIFELLQQGHPDALEFIHTKYHRNIFWVGKQILDDDFAVETLVQDTFLILWEKRDRIERPEHIYYFLRMVMKRECYTYYVRPKNKFFKTVNSLESFENYQEYLHGYDPEKDDLHLLNHEIQQKAFDRISRVLPLLSPERRRLIELCLKYDFRYKAIGQLMGTSITHTSNEVKKAIVDIKNIICQRSIQETKPKPVLAVKIQREMTQEQEKVLQLRTERQYSFAAIAKELNLSEKEVHQEFMSAYKLMQLKHEQQQSA

SEQ ID NO: 6050 - protein, 262 aa, Leeuwenhoekiella palythoae
MKRTAADKHYTGFKHGCPVALKAIYTQYHRQIYWMGRSLIKDVFVVETLVQDTFLTLWEKRESIESPQHLVNFLYTVISNECKWYYARPKNQFNRECYALEKMENYQSFMLGYDPTAVDIHLEDQQQQQREYEQVIKVLPLLGGQRQRLIELCLQHGFKYKIISEQLGISIKEASTTLKLTIDEIKNILHQGYVLQPQETEPMQNGEGQMTEQEARVLALRCEQQYSFAQIANELQISQKEVHRAFTAAYKLLQQHEHLQSA

SEQ ID NO: 6051 - protein, 200 aa, Sphingobacterium daejeonense
MNETLRQQETDRHIALLRKGDEKGLNFFYRRFYGYIFARAFRATQDDCAAKSIAQEALLRLWLFRKQLKDAEDIQAFLKAQVRSSINAYYNKTRNRFHRSLLRLDSIEDYQEFLLGHEMEEEEEMDIVYLERLDQEKQQRLIQLDNLMPSLNGQQQMFIKLCLKYSFNYERIAYYLGGISDYQVSLQVEKNDRYPTFYIQ

SEQ ID NO: 6052 - protein, 270 aa, Leadbetterella byssophila
MNIENINLIKLKNGNEAGLSYFYRRFFPWYTFRAFRYMRDDLDAQCAVQEAFLRLWLNRAQVDSVESMHEFLKRQVQEAAKAFHRKRSNEFRKSMLYYFDYDDPDILIGHRAVEEEVTEELQPDASDQEKLDSIHRLLPHLGREQELFIRLCLRFNFNYERIAFYLGGIRDYEVANKVNKCIVQLKTLVADSSKLSSASKMETIRVDERLTPEQAEVLKLRYELGASFDDIGQALQMPVSRVREIFIQAFTVFKHGKNHSYSKNTVSYSL

SEQ ID NO: 6053 - protein, 282 aa, Mucilaginibacter rigui
MVGKLCEISSFDDKVFEKILKQYRLTIYSFGKRMLNDSYIVENIVQDAFLKLWNFRQTITSDEHARRFLMQSVKWACYSYFRNSDSRFHRNMIRLNDYDNPADLFGEHPDVQTYNDHTEALNESRLNEVKEAIDKVCYGREKEVMELHFIKGLSHSQIAERYHLSIRTVTVIIEKGTVRLKTILVTVKTPVHDIQLSPAPGFVDSFNHIEGLNEEQNKIYHLRLTGRYDFEQIASFLQLPLAFVQTEYLKAWKIAACLKKKNGKPAGRANKGISGRYGLLSA

SEQ ID NO: 6054 - protein, 262 aa, Puia dinghuensis
MSYELPTPTEQAYFLRYKNGEEEGFTQLYRMMFNSLLRYGMRILPNEFAVTTIVQDALLKAWDFRERMTCLQHTFRFMCMNVKWACYDYYRQPEIRQVVYLDHDTYPDVSFLPGSEEAGPVCNEEALLKSIYDVMPYLPMNKQTILQLYFKYGFSYKQIAKRYGANIQTISKNLHEALAYLKKVIHSKKQLTKPISFPVTNDKYQAEEYLTGEMLQLFKLRYESKLPFDVIAAKLNLPQPYIQQQYAAAHAKLQQLKISRRP

SEQ ID NO: 6055 - protein, 276 aa, Pedobacter suwonensis
MNNNYKIAMQTIIKKQNQDVNFARFKEGDEKGLEFFYKRLYPALYFYSFRYIKDDINADCIVNEAFLRLWLVRRSIQDPDHIEPFIKKLTTQACKAYYRTSNKRFQRNMLRLDEIENYDEFIFGHDPEIEEDTEVICQEELENELKEKWIRLKTLIPNLTQDQQLIVRLCLKYSFNYDRIAWHIGGISDYQVARKVEKTLESLKAIFTNSQKLEIVGNNNRFRFEGDLNEEQSSILHMRYQLQYSFEEISSALNLDQGYIKKVFVGASIKIKKVKM

SEQ ID NO: 6056 - protein, 271 aa, Chryseobacterium gleum
MKRTNSPPLKLTDFQLYKLLKKGNPSSLEHIHLRYKRLLFWIGKQMLEDDFAVETLVQDTFLKLWLHRDSIETPNHILGFLRFVLKRDCITYFNTPKNKFARLTASLESFENYQDYIVGYDPVQDKEHLLRQESDQKNFDEVNKVLKVISPKRKYLIELCLQYGFQYKPIAEAMGSSVKDISNEVTRAINDLRKILRENSNDEPPIKSKKNEVKQNELSGQQIEIIKRRFREKSSFAIIARELKLSEKEVHQDFLYAYQYLQNQNNSEITI

SEQ ID NO: 6057 - protein, 258 aa, Zunongwangia profunda
MEREFKLLKEGHPDAMEFIYARYQHKLFWMGKQLIKDEFVIESILQDTFLKLWEKRDHIEDPKHMLYFLLHVMKRDCSYYYIRPRNNFHRNINSLDNYENYQEYIHGYDPESEDEHLKDQEANQKALDRIKCVFPLLRPERRYLIELCLKYGFQYKNIAELMGTSTTYTSNEVKRAIDDIKKIIHQGSNLGSKPDQIQVKKNTRITREQEKVLQLRNEMHYSFAAIAEELQLSQKEVHKEFMTAYKLLQSKHKQQQSA

SEQ ID NO: 6058 - protein, 271 aa, Chryseobacterium balustinum
MKRTNSLPRKLTNLQLYELLKKSNPTALEHLHLRYKRLLFWVGWQVLKDDFVVDTIVQDTFLKLWLHRDTIETPDHITGFLRFVMKRDCISYVTAPRNKFNRLMASLDSFENYQDYLAGYDPLKDKEYLLSQESDQKNFDEVKKVLPVLDPKRKHLIELCLEYGFQHKPIAEAMGSSVKDISNEVSRAINDLRKILNRSSSEQPKGKALDNKKQSEKLSSQQLDILKRRFEQKSSFAVIAQELKLPEKEVHREFLYAYQHLQNQNTSEIPL

SEQ ID NO: 6059 - protein, 258 aa, Paenimyroides baculatum
MPERNFELLKNSDPAALEKIHAQYRRLIFWVGRRWIDDDFVVENLVQDTFLKLWECRETIKDPLHILFFLKFVMKRNCYAHHAKPRNKFFKTNVHSFESYENYENSVTGYDPADAVQDLKGQEEDQQFFDHLNTVLPLIRPERRHLINLCLKYGFRYKAIAQVMGKGIMETVNEVKRAIEDIKVIVDRRKVLEKKDTGMVETVPQTISERQSQVLMLRCEKKFSFAAIAQELNLSQKEVHAEFMAAYKFRQQNMKELL

SEQ ID NO: 6060 - protein, 89 aa, Empedobacter brevis
MEKNNYKSNLNKKLCEYITIRFLSNFDNISNNNSQNKYAKAVGVTSSTISKISKGDGYNIPLSTIALILKYEKISLEDFFKDFNKYVNE

SEQ ID NO: 6061 - protein, 83 aa, Paenimyroides ummariense
MDITKDLQILIGKQLHDIRIKNKQTQNDIAFLTGIDTADVSKHEKGKKNLTLKTLMKFATALNIHPKELFNFDFDINRYKTEY

SEQ ID NO: 6062 - protein, 99 aa, Flagellimonas sp.
MLMADKNTNKSKVYFSDKYVCKFISEEWLTSKDTSARKYGKIYGVNYHVIEKIQQENGYNIPLSTLSTICFNHGIKLSDFFKLVEKKYGEFLNDSYEYK

SEQ ID NO: 6063 - protein, 97 aa, Flagellimonas sp.
MAKKNTNKSKVYFSDKYVCRFISEEWLTSKDTSARKYGKIYGVNYHVIEKIQQENGYNIPLSTLSTICFNHGIKLSDFFKLVEKKYGEFLNDSYEYK

SEQ ID NO: 6064 - protein, 129 aa, Flagellimonas sp.
MPTDTKANHIGKKIARIRELRGMKQETLAEELGISQQSVSTLEKSETLEDKKLEEIAKALGVTKEGIENFSEESVLNIISNSFHDQSALNAILNQPTFNPIDKVVELYERLVQAEKDKVTYLEKLLDKK

SEQ ID NO: 6065 - protein, 129 aa, Allomuricauda ruestringensis
MTTDTKTNHIGRKIARIRELRGMKQETLAEELGISQQSVSSLEKSETLEDKKLEEIAKALGVTKEGIENFSEESVLNIISNSFHDQSALNAILHQPTFNPIDKVVELYERLVQAEKDKVSYLEELLKKK

SEQ ID NO: 6066 - protein, 94 aa, Salegentibacter mishustinae
MIILVVDRATMQNKNYKEDFLLKFGENFGKIRRSKSLSFRSLSQKCDIDYADLNKIERGKRNITLTTIIELARGLDIHARELFDFSFTLKDLEK

SEQ ID NO: 6067 - protein, 98 aa, Leeuwenhoekiella palythoae
MLRFFTFIANYQFDMNEDQKRRLLIEFGKIVKFHRTEKLKISLRDLAKKCDVEHSAIGKIEKGEIKIQLPTVFELAKGLEIHPRDLFDFDFPLEETGN

SEQ ID NO: 6068 - protein, 153 aa, Sphingobacterium daejeonense
MNAIFREKNENMHIGHNIKRIREIQGIKQEAFGQLCRNRYSQQRISDFENMVALDEPLLNELASALGVTPEFVKSFKEENVIYNIQHSHTFNDHSTNSSQHTQPTFNSDGSDKLVALLERFIEEDRAKTRSIAELSKAVLDLTNEVKKIKEGK

SEQ ID NO: 6069 - protein, 65 aa, Sphingobacterium daejeonense
MEQMNRSSKIVAQGELDEQQAEIFHMRYQLQLSFDQISEALHLDPSTVRKIFVQAHTKIRTAQRT

SEQ ID NO: 6070 - protein, 73 aa, Leadbetterella byssophila
MTKKKTPFGKYLESKSINQAALARTTGIRPNRISEFATQDCLKMRADEIYLLAKALGERPGTLLDYLLAEIKS

SEQ ID NO: 6071 - protein, 138 aa, Leadbetterella byssophila
MEPKIHEGKNVKRFREMLGIKQEALAQELGEDWTQKKVSLMEQKAVLEPEVLYKVSKALNIPDMAIKNFDEEKAITIIANTVNNNDHATGNSLFNYQPIFNPIDKIVQLHEEKIQLYERMLREKEDMINKLEKLLPQN

SEQ ID NO: 6072 - protein, 71 aa, Mucilaginibacter rigui
MTNLGLFLAKKSVNKAEISRKTGISKSRLSELSMNNSTKLRADELYLIALAIDVDPKELLNHLFMDLKLKD

SEQ ID NO: 6073 - protein, 76 aa, Puia dinghuensis
MKTKIDLYVITRVKEKRLEKNISQAELANELGMSVGFIGKVESPKYPSHYNIKHLNQLAKILDCSPQEFLPKKPLP

SEQ ID NO: 6074 - protein, 77 aa, Puia dinghuensis
MKSKIDIYVIDKVREMRIAHNMSQEELSIKAGFRSNGFVGQAESFKYNKRYNVHHINRFAQIFNCSPQDFLPETYLY

SEQ ID NO: 6075 - protein, 127 aa, Pedobacter suwonensis
METKEQFKKTHLGRKISRIREIRGIKQDALAMELGLSQQTISKIEQSEDVDDETLNKISKALGVSSDAIKNFNEEAVVNIIANTVNNHDQSASVFISPNFNPIDKIVELYERLLKSEQEKNELLNKK

SEQ ID NO: 6076 - protein, 93 aa, Chryseobacterium gleum
MNESLEEIERYVIKRVKEIRESKNVTQEELSLSIGKNIGFISQIEAPSKKAKYNLIHLNLIAIALGCSIKDFLPDEPIRDKKYDIKEIQNKKS

SEQ ID NO: 6077 - protein, 79 aa, Zunongwangia profunda
MQNEKDKVDFLIQFGSNFGKIRKMKNLSFRALSQKCDLDYADLNKIEKGKRNITLTTIAELARGLNVHPKELFDFDFTP

SEQ ID NO: 6078 - protein, 77 aa, Chryseobacterium balustinum
MDVLKDEILKKFGEHVKDLRIKSGLTQDEVVLNSSKITKGTVSDIENGKRNFAFTTLIDLAKGLNVSPKDLLNFKID

SEQ ID NO: 6079 - protein, 114 aa, Paenimyroides baculatum
MKKIIDFETTQFDYDLINHIKGLRKIHSITKEELSVKMGVAKSFVGNVESATQRHKYATRHLTLLAKALGFKISDLLKFPTPEYDKIKVTVEQTYNEAGTKVIKSEVVKIEPIE

SEQ ID NO: 6080 - protein, 330 aa, Flagellimonas sp.
MALLNFQKPDKVIMIDSTDFEGKFEFRPLEPGYGLTVGNALRRVLLSSLEGFAITSVRIDGVEHEFSVVPGVVEDVTEIILNLKQVRFKRQIDDVESETVSISVSGKEQLTAGDFQKFISGYQVLNPDLVICNMGPKVSINMEIVIEKGRGYVPAEENKKSNAPLGSIAVDSVYTPVKNVKYSIENYRVEQKTDYEKLVFEIITDGSIHPKDALTEAAKVLIHHFMLFSDERITLEADEIAQTETYDEESLHMRQLLKTKLVDMDLSVRALNCLKAAEVDTLGDLVSFNKNDLMKFRNFGKKSLTELEELVINKGLQFGMDLSKYKLDKD

SEQ ID NO: 6081 - protein, 1269 aa, Flagellimonas sp.
MFTNTIERVNFASAKNIPEYPDFLDIQIKSFQDFFQLETKSDERGNEGLYNTFMENFPITDTRNQFVLEFLDYFIDPPRYSIQECIERGLTYSVPLKARLKLYCTDPEHEDFETIVQDVYLGTIPYMTPSGTFVINGAERVVVSQLHRSPGVFFGQSFHANGTKLYSARVIPFKGSWIEFATDINGVMYAYIDRKKKLPVTTLFRAIGFERDKDILEIFDLSEEVKVSKAGLKKVLGRKLAARVLNTWHEDFVDEDTGEVVSIERNEIILDRDTILEKEHIDEIIDADVKTILLHKENNAQSDYAIIHNTLQKDPTNSEKEAVEHIYRQLRNAEPPDEETARGIIEKLFFSDQRYSLGEVGRYRMNKKLGLDIGMDKEVLTKEDIITIIKYLIELINSKAEIDDIDHLSNRRVRTVGEQLSQQFGVGLARMARTIRERMNVRDNEVFTPIDLINAKTLSSVINSFFGTNQLSQFMDQTNPLAEITHKRRLSALGPGGLSRERAGFEVRDVHYTHYGRLCPIETPEGPNIGLISSLSVFAKVNSMGFLETPYRKVVDGKVDVKEHIYLSAEEEEGMKIAQANIPLKDDGTIDREKVIARDEGDFPVVDPVEINYTDVAPNQIASISASLIPFLEHDDANRALMGSNMMRQAVPLLRPESPIVGTGLERQVATDSRVLINAEGDGVVEYVDAQKITIKYDRTEEERLVSFEEDSKTYELVKFRKTNQGTSINLKPIVRKGDKVKKGQVLCEGYATEKGELALGRNMKVAFMPWKGYNFEDAIVISEKVVREDIFTSVHIDEYALEVRDTKLGAEELTNDIPNVSEEATRDLDEYGMIRIGAEVKPGDILIGKITPKGESDPTPEEKLLRAIFGDKAGDVKDASLKASPSLRGVVIDKKLFSRSIKDKRKRSEDKEAISRLEMDYEVKFQQLKDVLIEKLFGLVNGKTSQGVINDLGEEVLPKGKKYTIKMLNAVDDFAHLVGGSWTTDEDTNALVADLLHNYKIKLNDIQGNLRRDKFTISVGDELPAGIMKLAKVYIAKKRKLKVGDKMAGRHGNKGIVARIVRQEDMPFLEDGTPVDIVLNPLGVPSRMNIGQIYETVLGWAGLKLGQKYGTPIFDGATLDDINELTDKAGVPRFGHTYLYDGGTGQRFDQAATVGVIYMLKLGHMVDDKMHARSIGPYSLITQQPLGGKAQFGGQRFGEMEVWALEAYGASATLREILTVKSDDVIGRAKTYESIVKGETMPEPGLPESFNVLMHELKGLGLDIRLEE

SEQ ID NO: 6082 - protein, 1432 aa, Flagellimonas sp.
MARIKDNNAPKRFNKISIGLASPESILAESRGEVLKPETINYRTHKPERDGLFCERIFGPVKDYECACGKYKRIRYRGIVCDRCGVEVTEKKVRRDRVGHINLVVPVAHIWYFRSLPNKIGYLLGLPSKKLDMIIYYERYVVIQPGIAKGPEGEEIHKLDFLTEEEYLNILESLPSENQYLEENDPNKFIAKMGAECLIDLLARIDLEQLSYELRHKANTETSKQRKTEALKRLQVVEALRESQDNRENNPEWMIMKVIPVIPPELRPLVPLDGGRFATSDLNDLYRRVIIRNNRLKRLMEIKAPEVILRNEKRMLQEAVDSLFDNTRKASAVKTESNRPLKSLSDSLKGKQGRFRQNLLGKRVDYSARSVIVVGPEMKLYECGLPKDMAAELYKPFIIRKLIERGIVKTVKSAKKIIDKKEPVVWDILENVLKGHPVLLNRAPTLHRLGIQAFQPKLIEGKAIRLHPLACTAFNADFDGDQMAVHLPLGPEAILEAQLLMLASQNILNPANGSPITVPSQDMVLGLYYMTKEKRSTPEEPVIGEGLTFYSSEEVEIAFNERKVALNAIIKVRTKDFNEAGELVNKIIETTVGRVLFNTVVPEQAGYINTVLNKKSLRNIIGDILAVTDVPTTADFLDKIKTMGYEFAFKGGLSFSLGDIIIPKEKHEMIAEANEQVDGIMMNYNMGLITFNERYNQVIDVWTSTNAMLTELAMKRIREDKQGFNSVYMMLDSGARGSKEQIRQLTGMRGLMAKPKKSTAGGGEIIENPILSNFKEGLSILEYFISTHGARKGLADTALKTADAGYLTRRLVDVSQDVIINTEDCGTLRGIEVEALKKNEEVVETLGERILGRVSLHDVYNPLTEELILKAGQEISEADVKKVEAAPIEKVEVRSPLTCEAAQGICAKCYGRNLATNKMVQRGEAVGVVAAQSIGEPGTQLTLRTFHVGGIAGNISEDSKLEAKFDGIAEIEDLRVVEGVDNGGGKSDIVISRTSEIKIVDAKTGITLSTNNIPYGSQLFVKNGEKITKGTVICQWDPYNGVIVSEFTGQIAYENIEQGMTYQVEIDEQTGFQEKVISESRNKRLIPTLLIKDGKGETIRSYNLPVGSHLMVDNGEKIKEGKILVKIPRKSAKAGDITGGLPRVTELFEARNPSNPAVVTEIDGVVSFGKIKRGNREIIIESKAGEVKKYLVKLSNQILVQENDYVRAGMALSDGSITPEDILAIKGPSAVQQYLVNEVQEVYRLQGVKINDKHFEVVVRQMMRKVQIQDSGDTTFLENQLVHKDDFINENDEIFGKKVVEDAGDSERLKPGQIVTARQLRDENSILRREDKTLVTARDAVAATATPILQGITRASLQTKSFISAASFQETTKVLNEAAVNGKVDTLEGLKENVIVGHKIPAGTGMRDYDSIIVGSKEEYDEIMARKEEFKF

SEQ ID NO: 6083 - protein, 108 aa, Flagellimonas sp.
MQDLKNTKAPVSTATLNRNEFDSKTGNIYEAISIASKRAVQINSDIKKELLEKLEEFATYSDSLEEVFENKEQIEVSKFYEKLPKPHALAVQEWLEDKIYYRNTEKDA

SEQ ID NO: 6084 - RNA, 212 nt, synthetic construct
  source 1..212: mol_type = other RNA
caattaaaaactcaccctaaagcaaaggaagtacaattaatagctagtttaattgtaatcaataacaaagcacagcagattactgatatgattattggaaaaatgaaactgttgtgaataataatatttgagggtgcctgtacacccgtaaggtgaggtggttgatacatactcactgaatgcataaggcatatacagcaaagataacaatt

SEQ ID NO: 6085 - RNA, 88 nt, synthetic construct
  source 1..88: mol_type = other RNA
attttgagggtgcttgtacacccatagggtgaggttaagaattacactcactaagtgtgaacaacacatacaacttgtgggatatacg

SEQ ID NO: 6086 - RNA, 88 nt, synthetic construct
  source 1..88: mol_type = other RNA
ttttcgagggtgcttgtacacccgcaaggtgagctgaacatttcactcactaaatgcgcttagcatatacaacgcgtgggtatctctt

SEQ ID NO: 6087 - RNA, 86 nt, synthetic construct
  source 1..86: mol_type = other RNA
atcagagggtgcttgtacacccgtaaagtgaggtcgcgggcactcaccaaatgcaggaagcatatacaacggcgtgttcatctaca

SEQ ID NO: 6088 - RNA, 85 nt, synthetic construct
  source 1..85: mol_type = other RNA
tttttttaggggctgtccgcacagccttaggttggggctattcgcactcaataagtgaaagcatgcggttaaggcgtgagaaacc

SEQ ID NO: 6089 - RNA, 115 nt, synthetic construct
  source 1..115: mol_type = other RNA
ctgtcaataaaatatgaggctgcttgtacagccgtagggtgtggccttgttgcctcactgaatatggattgaacctgagatcacatctgtatatacaacggctcgcttatcgtgt

SEQ ID NO: 6090 - RNA, 88 nt, synthetic construct
  source 1..88: mol_type = other RNA
atatcgagggtgcttgtacacccgtagggtgaggtcttggacactcactaaatactcttgtagcatatacaacggcgtgggctctttt

SEQ ID NO: 6091 - RNA, 89 nt, synthetic construct
  source 1..89: mol_type = other RNA
ttaaaaatgagggtgcttgtacacccgtaaggtgaggtctcaatggcactcactaaatgcaggcagcatatacaacaaaaaccttccct

SEQ ID NO: 6092 - RNA, 85 nt, synthetic construct
  source 1..85: mol_type = other RNA
ataacgagggtgcttgtacacccgcagggtgaggtgttgaacactcactaaatactcagtgagtatatacaacggcgtgggctct

SEQ ID NO: 6093 - RNA, 100 nt, synthetic construct
  source 1..100: mol_type = other RNA
taaaaatacaattatgagggtgattgtacacccgtagggtgagtttggttggcaacactcactaaatgcacaggcatatacaacgcgtggcttacttgtt

SEQ ID NO: 6094 - RNA, 219 nt, synthetic construct
  source 1..219: mol_type = other RNA
caattaaaaactcaccctaaagcaaaggaagtacaattaatagctagtttaattgtaatcaataacaaagcacagcagattactgatatgattattggaaaaatgaaactgttgtgaataataatatttgagggtgcctgtacacccgtaaggtgaggtggttgatacatactcactgaatgcataaggcatatacagcaaagataacaattaaaaact

SEQ ID NO: 6095 - RNA, 101 nt, synthetic construct
  source 1..101: mol_type = other RNA
caattagattttgagggtgcttgtacacccatagggtgaggttaagaattacactcactaagtgtgaacaacacatacaacttgtgggatatacgctaaca

SEQ ID NO: 6096 - RNA, 97 nt, synthetic construct
  source 1..97: mol_type = other RNA
aatattttcgagggtgcttgtacacccgcaaggtgagctgaacatttcactcactaaatgcgcttagcatatacaacgcgtgggtatctcttaattt

SEQ ID NO: 6097 - RNA, 100 nt, synthetic construct
  source 1..100: mol_type = other RNA
tgactttatgatcagagggtgcttgtacacccgtaaagtgaggtcgcgggcactcaccaaatgcaggaagcatatacaacggcgtgttcatctacactta

SEQ ID NO: 6098 - RNA, 94 nt, synthetic construct
  source 1..94: mol_type = other RNA
aaagatttttttaggggctgtccgcacagccataggttggggctattcgcactcaataagtgaaagcatgcggttaaggcgtgagaaacctaca

SEQ ID NO: 6099 - RNA, 119 nt, synthetic construct
  source 1..119: mol_type = other RNA
ctgtcaataaaatatgaggctgcttgtacagccgtagggtgtggccttgttgcctcactgaatatggattgaacctgagatcacatctgtatatacaacggctcgcttatcgtgtaaaa

SEQ ID NO: 6100 - RNA, 100 nt, synthetic construct
  source 1..100: mol_type = other RNA
ctgaaaaatatcgagggtgcttgtacacccgtagggtgaggtcttggacactcactaaatactcttgtagcatatacaacggcgtgggctcttttacaaa

SEQ ID NO: 6101 - RNA, 98 nt, synthetic construct
  source 1..98: mol_type = other RNA
aattaaaaatgagggtgcttgtacacccgtaaggtgaggtctcaatggcactcactaaatgcaggcagcatatacaacaaaaaccttcccttttttta

SEQ ID NO: 6102 - RNA, 97 nt, synthetic construct
  source 1..97: mol_type = other RNA
aaaaaataacgagggtgcttgtacacccgcagggtgaggtgttgaacactcactaaatactcagtgagtatatacaacggcgtgggctcttttttta

SEQ ID NO: 6103 - RNA, 104 nt, synthetic construct
  source 1..104: mol_type = other RNA
taaaaatacaattatgagggtgattgtacacccgtagggtgagtttggttggcaacactcactaaatgcacaggcatatacaacgcgtggcttacttgttttta

SEQ ID NO: 6104 - RNA, 1293 nt, synthetic construct
  source 1..1293: mol_type = other RNA
taaacaatatattaaggatacatttacacccgtaaggtgaggttgttggtacatactcacggaatgcacaaagcatatacagctagaaatattaattaaaaaaaaggctaaccttaaagaaaaagaagtacaattaataactagtttaatcgtgatcaataacaaagcacagcagattactgatatgataattggaaaaatgaaactgttgtgaataataatatttgagggtgcctgtacacccgtaaggtgaggtggttgatacatactcactgaatgcataaggcatatacaacaaatataacaattaaaaactcaccctaaagcaaaggaagtacaattaatagctagtttaattgtaatcaataacaaagcacagcagattactgatatgattattggaaaaatgaaactgttgtgaataataatatttgagggtgcctgtacacccgtaaggtgaggtggttgatacatactcactgaatgcataaggcatatacaacaaatataacaattaaaaactcaccctaaagcaaaggaagtacaattaatagctagtttaattgtaatcaataacaaagcacagcagattactgatatgattattggaaaaatgaaactgttgtgaataataatatttgagggtgcctgtacacccgtaaggtgaggtggttgatacatactcactgaatgcataaggcatatacagcaaagataacaattaaaaactcaccctaaagcgaaggaagtacaattaatagctagtttaattgtaatcaataacaaagcacagcagattactgaagtgattcttggacaaaagcagaacctgttgtgagtaataatattagagggtgcctatacacccgtaaggtgaggttgttggcaaacaatcaatgaatgcgtacggcagatataacagagaatatttagagtttattaatggaaagcttttgtcaagtatatgtagctccgtagtggttcaaaacaacaatagttagtgtatacttaattacgaagctatattgaaatacagtatgtatagggatataatattttgagagtggttgtacacctatatagtgaggttgcgggtaaaaagtcactgaatgcagtaagaatataaaactctgaaaaaacttataaaaataaataagaacctttaaaagccttacaaatacatttttcacagaaatagttaaagtgtttaaaaatagttaattataacgttctgcgttttctaaattaataattattattatttttgaaataacttaccaacataattattaa

SEQ ID NO: 6105 - RNA, 615 nt, synthetic construct
  source 1..615: mol_type = other RNA
caattagattttgagggtgcttgtacacccatagggtgaggttaagaattacactcactaagtgtgaacaacacatacaacttgtgggatatacgctaacaatagcaatcaataagcctaaatacgggcacctaaatacaatatgggacaaacaccgataaagtttttttgaacgattgaaaatggatacttttaatgaagtgtccagaaatcgtcaaatattagatagaacccttgggatattgcttctccttataggtatcgcaattgggattttccttattcctgattttttaccactacttaaaaggactccttatttattgctcgaacccgatgcaggtgtaagacatgagcttggatacgcttggtttatgcaatcaattggttggatcattgcttttttcgcatttaggagcagtagggcatttttaagggatagcaagaaaccaactagtaccagtaattaaatcaaaggtgaaagaggtatatagttgcctaaacaccatatacaactcactgaaaaaccgctccgaaacgcaatattctgtgatgacagccattcatccggtaggctaaagtatgtaaaaagaagctaatgtcatcttccctttt

SEQ ID NO: 6106 - RNA, 349 nt, synthetic construct
  source 1..349: mol_type = other RNA
aatattttcgagggtgcttgtacacccgcaaggtgagctgaacatttcactcactaaatgcgcttagcatatacaacgcgtgggtatctcttaatttcattagaaaaagatcttaagccgagcatagttgaaaacttaaaaatctatcagcacttactattgctagtaaggaattgcctaatttaatgccttccttcgacgaaaatttgatatttttaaataaggttatccaatttcattttttaagaacagtaaattttacaaagtcgaatgcaattaaaattacctttaagaaacttgataaggagttcataaccaaatttcttacttattttaaaaaaacagacta

SEQ ID NO: 6107 - RNA, 431 nt, synthetic construct
  source 1..431: mol_type = other RNA
acctattgattgactttatgatcagagggtgcttgtacacccgtaaagtgaggtcgcgggcactcaccaaatgcaggaagcatatacaacggcgtgttcatctacacttagaaaacaagagcttttttgtgaggcatataaaataaacaatgttgaattttcaatctagaattttaaatagaatctgagggtacttgtatacccgtagggtgaggctttggcactcactaagtagcatacagcttatatacaatggcgtgagttaattatctttaaaccgttttaaaatgattgtacacaaaaggtcctagttttatccagccttaatactattaaaaattatcccttgataaactacacgttgggttaattgtaaaagttggtttaggttccgaatgaagtgtaatcaacagcttatttttaaagaaaac

SEQ ID NO: 6108 - RNA, 258 nt, synthetic construct
  source 1..258: mol_type = other RNA
aaagatttttttaggggctgtccgcacagccttaggttggggctattcgcactcaataagtgaaagcatgcggttaaggcgtgagaaacctacatctaagcttgtaattccagtttttgtggcgtttaactggacttttgggattatttcggggatttattttctttttcaaatgaattttcattttccatttgcgctgataaaagtacacgtctacatttgaaactatagttaacctatagaataaatatattaaat

SEQ ID NO: 6109 - RNA, 168 nt, synthetic construct
  source 1..168: mol_type = other RNA
ctgtcaataaaatatgaggctgcttgtacagccgtagggtgtggccttgttgcctcactgaatatggattgaacctgagatcacatctgtatatacaacggctcgcttatcgtgtaaaaataagctttctataagttgtacggttaagttataagcagaacttatagt

SEQ ID NO: 6110 - RNA, 234 nt, synthetic construct
  source 1..234: mol_type = other RNA
ctgaaaaatatcgagggtgcttgtacacccgtagggtgaggtcttggacactcactaaatactcttgtagcatatacaacggcgtgggctcttttacaaagaaaatatgaattggcgacttcattaaatagacccctttaattttgaggatcttgaaaaacacaacttctcaattaattataagaaagaggcggtattattttgtagcatagaatattttagcagaaatcttta

SEQ ID NO: 6111 - RNA, 175 nt, synthetic construct
  source 1..175: mol_type = other RNA
aattaaaaatgagggtgcttgtacacccgtaaggtgaggtctcaatggcactcactaaatgcaggcagcatatacaacaaaaaccttccctttttttaggcattgaggtatgaaggatgaagacaactggaattatgatgaacagaaatatttaggcttggtcattgaaaatcaa

SEQ ID NO: 6112 - RNA, 260 nt, synthetic construct
  source 1..260: mol_type = other RNA
aaaaaataacgagggtgcttgtacacccgcagggtgaggtgttgaacactcactaaatactcagtgagtatatacaacggcgtgggctctttttttacttatgttttaaaatacttcaaacgctcattaataaattaaaggattacttcagggtaataacttttatatttaaggctcaaccatctagttgagccttaaatatgaattacaaatgtacttttacagcatctctgttttttaaatacttataaatagcatta

SEQ ID NO: 6113 - RNA, 188 nt, synthetic construct
  source 1..188: mol_type = other RNA
taaaaatacaattatgagggtgattgtacacccgtagggtgagtttggttggcaacactcactaaatgcacaggcatatacaacgcgtggcttacttgtttttaataagcgtatcagcaaaaattgcacgaaaaatttcaggattatttttttgacgatttataatctaacgataaggaaactcaata

SEQ ID NO: 6114 - DNA, 59 bp, synthetic construct
  source 1..59: mol_type = other DNA
aaaggaagcattaaaatgaggattcaacacaacattatggcgatgagcgcctaccgcaa

SEQ ID NO: 6115 - DNA, 59 bp, synthetic construct
  source 1..59: mol_type = other DNA
ttgcggtaggcgctcatcgccataatgttgtgttgaatcctcattttaatgcttccttt

SEQ ID NO: 6116 - DNA, 59 bp, synthetic construct
  source 1..59: mol_type = other DNA
aaggagaagtgaatcatgagaatccaacataacattatggcaatgaatgcctaccgtaa

SEQ ID NO: 6117 - DNA, 59 bp, synthetic construct
  source 1..59: mol_type = other DNA
ttacggtaggcattcattgccataatgttatgttggattctcatgattcacttctcctt

SEQ ID NO: 6118 - RNA, 32 nt, synthetic construct
  source 1..32: mol_type = other RNA
cgatgccggtttcggctggagggcgttgagcg

SEQ ID NO: 6119 - RNA, 92 nt, synthetic construct
  source 1..92: mol_type = other RNA
tcagcgttttccaggccggagggtgggaaacgagagggcgcgtgcgcgcgcctgaaagcctgtgacagggctgtccaaaatattatgacgat

SEQ ID NO: 6120 - RNA, 49 nt, synthetic construct
  source 1..49: mol_type = other RNA
ggacggaccaaggatgagcgtccgggaataacgataaggagatagaaac

SEQ ID NO: 6121 - protein, 528 aa, unidentified
MAKNTITKTLKLRIVRPYNSAEVEKIVADEKNNREKIALEKNKDKVKEACSKHLKVAAYCTTQVERNACLFCKARKLDDKFYQKLRGQFPDAVFWQEISEIFRQLQKQAAEIYNQSLIELYYEIFIKGKGIANASSVEHYLSDVCYTRAAELFKNAAIASGLRSKIKSHFRLKELKNMKSGLPTTKSDNRPIPLVKQKGGQYTGFEISNHNSDFIIKIPFGRWQVKKEIDKYRPWEKFDFEQVQKSPKPISLLLSTQRRKRNKGWSKDEGTEAEIKKVMNGDYQTSYIEVKRGSKICEKSAWMLNLSIDVPKIDKGVDPSIIGGIDVGVKSPLVCAINNAFSRYSISDNDLFHFNKKMFARRRILLKKNRHKRAGHGAKNKLKPITILTEKSERFRKKLIERWACEIADFFIKNKVGTVGMENLESMKRKEDSYFNIRLRGFWPYAEMQNKIEFKLKQYGIEIRKVAPNNTSKTCSKCGHLNNTFNFEYRKKNKFPHKCEKCNFKENADYNAALNISNPKLKSTKEEP

SEQ ID NO: 6122 - protein, 507 aa, unidentified
MEEAKTVSKTLSLRILRPLYSAEIEKEIKEEKERRKQGGKSGELDSGFYKKLEKKHTQMFGWDKLNLMLSQLQRQIARVFNQSISELYIETVIQCKKSNKHYTSKIVYNRAYSVFYNAYLALGITSKVEANFRSTELLMQKSSLPTAKSDNRPILLHKQKGVEGEEGGFKISADGNDLIFEIPIPFYEDSANKKEPFKWIKKGGQKPTIKLILSTFRRQRNKGWAKDEGTDAEIRKVIEGKYQVSHIEINRGKKLGDHQKWFVNFTIEQPIYERKLDKNIIGGIDVGIKSPLVCAVNNSFARYSVDSNDVLKFSKQAFAFRRRLLSKNSLKRSGHGSKNKLDPITRMTEKNDRFRKKIIERWAKEVTNFFIKNQFGTVQIEDLSTMKDRQDNFFNQQYLRGFWPYYQMQNLIENKLKEYGIETKRIKARYTSQLCSHPSCRHWNSYFSFDHRKTNNFPKFKCEKCALEISADYNAARNISTPDIEKFVAKATKGINLPDKNENVILE

SEQ ID NO: 6123 - protein, 500 aa, unidentified
MEVQKTVMKTLSLRILRPLYSQEIEKEIKEEKERRKQAGGTGELDGGFYKKLEKKHSEMFSFDRLNLLLNQLQREIAKVYNHAISELYIATIAQGNKSNKHYISSIVYNRAYGYFYNAYIALGICSKVEANFRSNELLTQQSALPTAKSDNFPIVLHKQKGAEGEDGGFRISTEGSDLIFEIPIPFYEYNGENRKEPYKWVKKGGQKPVLKLILSTFRRQRNKGWAKDEGTDAEIRKVTEGKYQVSQIEINRGKKLGEHQKWFANFSIEQPIYERKPNRSIVGGLDVGIRSPLVCAINNSFSRYSVDSNDVFKFSKQVGAGRRRLLSKNSLKRKGHGAAHKLEPITEMTEKNDKFRKKIIERWAKEVTNFFVKNQVGIVQIEDLSTMKDREDHFFNQYLRGFWPYYQMQTLIENKLKEYGIEVKRVQAKYTSQLCSNPNCRYWNNYFNFEYRKVNKFPKFKCEKCNLEISADYNAARNLSTPDIEKFVAKATKGINLPEK

SEQ ID NO: 6124 - DNA, 40 bp, synthetic construct
  source 1..40: mol_type = other DNA
atatacagcaaagataacaattaaaaactcaccctaaagc

SEQ ID NO: 6125 - DNA, 20 bp, synthetic construct
  source 1..20: mol_type = other DNA
aacaaatataacaattaaaa

SEQ ID NO: 6126 - DNA, 20 bp, synthetic construct
  source 1..20: mol_type = other DNA
caacaatataacaattaaaa

SEQ ID NO: 6127 - DNA, 25 bp, synthetic construct
  source 1..25: mol_type = other DNA
acaacttgtgggatatacgctaaca

SEQ ID NO: 6128 - DNA, 33 bp, synthetic construct
  source 1..33: mol_type = other DNA
tatacaacgcgtgggtatctcttaatttcatta

SEQ ID NO: 6129 - DNA, 24 bp, synthetic construct
  source 1..24: mol_type = other DNA
caacggcgtgttcatctacactta

SEQ ID NO: 6130 - DNA, 25 bp, synthetic construct
  source 1..25: mol_type = other DNA
caatggcgtgagttaattatcttaa

SEQ ID NO: 6131 - DNA, 25 bp, synthetic construct
  source 1..25: mol_type = other DNA
cggttaaggcgtgagaaacctacat

SEQ ID NO: 6132 - DNA, 24 bp, synthetic construct
  source 1..24: mol_type = other DNA
aacggctcgcttatcgtgtaaaaa

SEQ ID NO: 6133 - DNA, 30 bp, synthetic construct
  source 1..30: mol_type = other DNA
atacaacggcgtgggctcttttacaaagaa

SEQ ID NO: 6134 - DNA, 28 bp, synthetic construct
  source 1..28: mol_type = other DNA
acaacaaaaaccttccctttttttaggc

SEQ ID NO: 6135 - DNA, 36 bp, synthetic construct
  source 1..36: mol_type = other DNA
agtatatacaacggcgtgggctctttttttacttat

SEQ ID NO: 6136 - DNA, 28 bp, synthetic construct
  source 1..28: mol_type = other DNA
tacaacgcgtggcttacttgtttttaat

SEQ ID NO: 6137 - RNA, 99 nt, synthetic construct
  source 1..99: mol_type = other RNA
ywrwmawttaattwtgagggtgcttgtacacccgtagggtgaggtyttgkrcactcactaaatgcagayagcatatacaacnnnnnnnnnnnnnnnnay

SEQ ID NO: 6138 - RNA, 74 nt, synthetic construct
  source 1..74: mol_type = other RNA
attttgagggtgcttgtacacccatagggtgaggttaagaattacactcactaagtgtgaacaacacatacaac

SEQ ID NO: 6139 - RNA, 73 nt, synthetic construct
  source 1..73: mol_type = other RNA
ttttcgagggtgcttgtacacccgcaaggtgagctgaacatttcactcactaaatgcgcttagcatatacaac

SEQ ID NO: 6140 - RNA, 70 nt, synthetic construct
  source 1..70: mol_type = other RNA
atcagagggtgcttgtacacccgtaaagtgaggtcgcgggcactcaccaaatgcaggaagcatatacaac

SEQ ID NO: 6141 - RNA, 76 nt, synthetic construct
  source 1..76: mol_type = other RNA
ttaaaaatgagggtgcttgtacacccgtaaggtgaggtctcaatggcactcactaaatgcaggcagcatatacaac

SEQ ID NO: 6142 - RNA, 73 nt, synthetic construct
  source 1..73: mol_type = other RNA
atatcgagggtgcttgtacacccgtagggtgaggtcttggacactcactaaatactcttgtagcatatacaac

SEQ ID NO: 6143 - RNA, 72 nt, synthetic construct
  source 1..72: mol_type = other RNA
ataacgagggtgcttgtacacccgcagggtgaggtgttgaacactcactaaatactcagtgagtatatacaa

SEQ ID NO: 6144 - RNA, 72 nt, synthetic construct
  source 1..72: mol_type = other RNA
atctgagggtacttgtatacccgtagggtgaggctttggcactcactaagtagcatacagcttatatacaat

SEQ ID NO: 6145 - RNA, 83 nt, synthetic construct
  source 1..83: mol_type = other RNA
taaaaatacaattatgagggtgattgtacacccgtagggtgagtttggttggcaacactcactaaatgcacaggcatatacaa

SEQ ID NO: 6146 - RNA, 107 nt, synthetic construct
  source 1..107: mol_type = other RNA
ctgtcaataaaatatgaggctgcttgtacagccgtagggtgtggccttgttgccttgttgcctcactgaatatggattgaacctgagatcacatctgtatatacaac

SEQ ID NO: 6147 - RNA, 69 nt, synthetic construct
  source 1..69: mol_type = other RNA
tttttttaggggctgtccgcacagccataggttggggctattcgcactcaataagtgaaagcatgcggt

SEQ ID NO: 6148 - RNA, 20 nt, synthetic construct
  source 1..20: mol_type = other RNA
ynnggcgtgggttacttgty

SEQ ID NO: 6149 - RNA, 14 nt, synthetic construct
  source 1..14: mol_type = other RNA
ttgtgggatatacg

SEQ ID NO: 6150 - RNA, 15 nt, synthetic construct
  source 1..15: mol_type = other RNA
gcgtgggtatctctt

SEQ ID NO: 6151 - RNA, 17 nt, synthetic construct
  source 1..17: mol_type = other RNA
ggcgtgagttaattatc

SEQ ID NO: 6152 - RNA, 15 nt, synthetic construct
  source 1..15: mol_type = other RNA
ggcgtgggctctttt

SEQ ID NO: 6153 - RNA, 13 nt, synthetic construct
  source 1..13: mol_type = other RNA
cggcgtgggctct

SEQ ID NO: 6154 - RNA, 16 nt, synthetic construct
  source 1..16: mol_type = other RNA
gcgtggcttacttgtt

SEQ ID NO: 6155 - RNA, 16 nt, synthetic construct
  source 1..16: mol_type = other RNA
taaggcgtgagaaacc

SEQ ID NO: 6156 - RNA, 16 nt, synthetic construct
  source 1..16: mol_type = other RNA
ggctcgcttatcgtgt

SEQ ID NO: 6157 - RNA, 16 nt, synthetic construct
  source 1..16: mol_type = other RNA
ggcgtgttcatctaca

SEQ ID NO: 6158 - RNA, 13 nt, synthetic construct
  source 1..13: mol_type = other RNA
aaaaaccttccct

SEQ ID NO: 6159 - RNA, 88 nt, synthetic construct; identical to SEQ ID NO: 6085
  source 1..88: mol_type = other RNA

SEQ ID NO: 6160 - RNA, 14 nt, synthetic construct
  source 1..14: mol_type = other RNA
ttgtgggatatacg

SEQ ID NO: 6161 - DNA, 27 bp, synthetic construct
  source 1..27: mol_type = other DNA
ggctagcgttgtgggatacccgttaca

SEQ ID NO: 6162 - DNA, 146 bp, synthetic construct
  source 1..146: mol_type = other DNA
agctaatgtcatcttcccttttctcctcgaggcggccgcaaatgaaaaaattacaagaagtttttttgagagcgttcgctctcatttaggggtttttattatatttatccctgaaataacatatttgcgaaacttgttaagttaat

SEQ ID NO: 6163 - DNA, 16 bp, synthetic construct
  source 1..16: mol_type = other DNA
agcgacgtctggatcg

SEQ ID NO: 6164 - protein, 10 aa, synthetic construct
PKKKRKVEDP

SEQ ID NO: 6165 - protein, 9 aa, synthetic construct
PAAKRVKLD

SEQ ID NO: 6166 - protein, 15 aa, synthetic construct
KRPAATKKAGQAKKK

SEQ ID NO: 6167 - protein, 25 aa, synthetic construct
MSRRRKANPTKLSENAKKLAKEVEN

SEQ ID NO: 6168 - protein, 18 aa, synthetic construct
KRTADGSEFESPKKKRKV
